(19) United States
(12) Patent Application Publication
(10) Pub. No.: US 2003/0017495 A1
(43) Pub. Date: Jan. 23, 2003

(54) Enterococcus faecalis polynucleotides and polypeptides

(75) Inventors: Gil H. Choi, Rockville, MD (US); Camella Bailey, Washington, DC (US); Alex Hromockyj, Mountainview, CA (US); Charles A. Kunsch, Norcross, GA (US)

Correspondence Address: HUMAN GENOME SCIENCES INC, 9410 KEY WEST AVENUE, ROCKVILLE, MD, 20850

(73) Assignee: Human Genome Sciences, Inc., Rockville, MD

(21) Appl. No.: 10/206,576

(22) Filed: Jul. 29, 2002

Related U.S. Application Data
(62) Division of application No. 09/071,035, filed on May 4, 1998, now Pat. No. 6,448,043.
(60) Provisional application No. 60/066,009, filed on Nov. 14, 1997.
(60) Provisional application No. 60/046,655, filed on May 16, 1997.
(60) Provisional application No. 60/044,031, filed on May 6, 1997.

(51) Int. Cl. C12Q 1/68; C07H 21/04; C12P 21/02; C12N 1/21; C12N 15/74; C12N 9/00

(52) U.S. Cl. 435/6; 435/69.3; 435/183; 435/252.3; 435/320.1; 536/23.7

(57) ABSTRACT

The present invention relates to novel genes from E. faecalis and the polypeptides they encode. Also provided as are vectors, host cells, antibodies and methods for producing the same. The invention further relates to screening methods for identifying agonists and antagonists of E. faecalis polypeptide activity. The invention additionally relates to diagnostic methods for detecting Enterococcus nucleic acids, polypeptides and antibodies in a biological sample. The present invention further relates to novel vaccines for the prevention or attenuation of infection by Enterococcus.

### CROSS REFERENCE TO RELATED APPLICATIONS

[0001] This application is a division of and claims priority under 35 U.S.C. §120 to U.S. application Ser. No. 09/071,035, filed May 4, 1998, which is a nonprovisional of and claims benefit under 35 U.S.C. §119(e) of U.S. Provisional Application No. 60/046,655, filed May 16, 1997, No. 60/044,031, filed May 6, 1997, and No. 60/066,009, filed Nov. 14, 1997. U.S. Provisional Application No. 60/066,009, filed Nov. 14, 1997 is herein incorporated by reference in its entirety.

### REFERENCE TO SEQUENCE LISTING AND TABLE 1

[0002] This application refers to a “Sequence Listing” and Table 1 listed below, which are provided as electronic documents on two identical compact discs (CD-R), labeled “Copy 1” and “Copy 2.” These compact discs each contain the following files, which are hereby incorporated in their entirety herein:

| Document | File Name | Size in bytes | Date of Creation |
|---|---|---|---|
| Sequence | PB369P1D1.seqlist.txt | 1,476,652 | 07/29/2002 |
| Listing | | | |
| Table 1 | PB369P1D1.table1.txt | 476,355 | 07/29/2002 |

### FIELD OF THE INVENTION

[0003] The present invention relates to novel Enterococcus faecalis genes (E. faecalis) nucleic acids and polypeptides. Also provided are vectors, host cells and recombinant methods for producing the same. Further provided are diagnostic methods for detecting Enterococcus faecalis using probes, primers, and antibodies to the E. faecalis nucleic acids and polypeptides of the present invention. The invention further relates to screening methods for identifying agonists and antagonists of E. faecalis polypeptide activity and to vaccines using E. faecalis nucleic acids and polypeptides.

### BACKGROUND OF THE INVENTION

[0004] Enterococci have been recognized as being pathogenic for humans since the turn of the century when they were first described by Thiercelin in 1988 as microscopic organisms. The genus Enterococcus includes the species Enterococcus faecalis or E. faecalis which is the most common pathogen in the group, accounting for 80-90 percent of all enterococcal infections. See Lewis et al. (1990) Eur J. Clin Microbiol Infect Dis.9:111-117.

[0005] The incidence of enterococcal infections has increased in recent years and enterococci are now the second most frequently reported nosocomial pathogens. Enterococcal infection is of particular concern because of its resistance to antibiotics. Recent attention has focused on enterococci not only because of their increasing role in nosocomial infections, but also because of their remarkable and increasing resistance to antimicrobial agents. These factors are mutually reinforcing since resistance allows enterococci to survive in an environment in which antimicrobial agents are heavily used; the hospital setting provides the antibiotics which eliminate or suppress susceptible bacteria, thereby providing a selective advantage for resistant organisms, and the hospital also provides the potential for dissemination of resistant enterococci via the usual routes of hand and environmental contamination.

[0006] Antimicrobial resistance can be divided into two general types, inherent or intrinsic property and that which is acquired. The genes for intrinsic resistance, like other species characteristics, appear to reside on the chromosome. Acquired resistance results from either a mutation in the existing DNA or acquisition of new DNA. The various inherent traits expressed by enterococci include resistance to semisynthetic penicillinase-resistant penicillins, cephalosporins, low levels of aminoglycosides, and low levels of clindamycin. Examples of acquired resistance include resistance to chloramphenicol, erythromycin, high levels of clindamycin, tetracycline, high levels of aminoglycosides, penicillin by means of penicillinase, fluoroquinolones, and vancomycin. Resistance to high levels of penicillin without penicillinase and resistance to fluoroquinolones are not known to be plasmid or transposon mediated and presumably are due to mutation(s).

[0007] Although the main reservoir for enterococci in humans is the gastrointestinal tract, the bacteria can also reside in the gallbladder, urethra and vagina.

[0008] E. faecalis has emerged as an important pathogen in endocarditis, bacteremia, urinary tract infections (UTIs), intraabdominal infections, soft tissue infections, and neonatal sepsis. See Lewis et al. (1990) supra. In the 1970s and 1980s enterococci became firmly established as major nosocomial pathogens. They are now the fourth leading cause of hospital-acquired infection and the third leading cause of bacteremia in the United States. Fatality ratios for enterococcal bactermia range from 12% to 68%, with death due to enterococcal sepsis in 4 to 50% of these cases. See T. G. Emori (1993) Clin. Microbiol. Rev. 6:428-442.

[0009] The ability of enterococci to colonize the gastrointestinal tract, plus the many intrinsic and acquired resistance traits, means that these organisms, which usually seem to have relatively low intrinsic virulence, are given an excellent opportunity to become secondary invaders. Since nosocomial isolates of enterococci have displayed resistance to essentially every useful antimicrobial agent, it will likely become increasingly difficult to successfully treat and control enterococcal infections. Particularly when the various resistance genes come together in a single strain, an event almost certain to occur at some time in the future.

[0010] The etiology of diseases mediated or exacerbated by Enterococcus faecalis, involves the programmed expression of E. faecalis genes, and that characterizing these genes and their patterns of expression would dramatically add to our understanding of the organism and its host interactions. Knowledge of the E. faecalis gene and genomic organization would improve our understanding of disease etiology and lead to improved and new ways of preventing, treating and diagnosing diseases. Thus, there is a need to characterize the genome of E. faecalis and for polynucleotides of this organism.

### SUMMARY OF THE INVENTION

[0011] The present invention provides for isolated E. faecalis polynucleotides and polypeptides shown in Table 1 and SEQ ID NO:1 through SEQ ID NO:496 (polynucleotide sequences having odd SEQ ID NOs and polypeptide sequences having even SEQ ID NOs). One aspect of the invention provides isolated nucleic acid molecules comprising polynucleotides having a nucleotide sequence selected from the group consisting of: (a) a nucleotide sequence shown in Table 1; (b) a nucleotide sequence encoding any of the amino acid sequences of the polypeptides shown in Table 1; and (c) a nucleotide sequence complementary to any of the nucleotide sequences in (a) or (b). The invention further provides for fragments of the nucleic acid molecules of (a), (b) & (c) above.

[0012] Further embodiments of the invention include isolated nucleic acid molecules that comprise a polynucleotide having a nucleotide sequence at least 90% identical, and more preferably at least 95%, 96%, 97%, 98% or 99% identical, to any of the nucleotide sequences in (a), (b) or (c) above, or a polynucleotide which hybridizes under stringent hybridization conditions to a polynucleotide in (a), (b) or (c) above. Additional nucleic acid embodiments of the invention relate to isolated nucleic acid molecules comprising polynucleotides which encode the amino acid sequences of epitope-bearing portions of a E. faecalis polypeptide having an amino acid sequence in (a) above.

[0013] The present invention also relates to recombinant vectors, which include the isolated nucleic acid molecules of the present invention, and to host cells containing the recombinant vectors, as well as to methods of making such vectors and host cells. The present invention further relates to the use of these vectors in the production of E. faecalis polypeptides or peptides by recombinant techniques.

[0014] The invention further provides isolated E. faecalis polypeptides having an amino acid sequence selected from the group consisting of an amino acid sequence of any of the polypeptides described in Table 1 or fragments thereof.

[0015] The polypeptides of the present invention also include polypeptides having an amino acid sequence with at least 70% similarity, and more preferably at least 75%, 80%, 85%, 90%, 95%, 96%, 97%, 98%, or 99% similarity to those described in Table 1, as well as polypeptides having an amino acid sequence at least 70% identical, more preferably at least 75% identical, and still more preferably 80%, 85%, 90%, 95%, 96%, 97%, 98%, or 99% identical to those above; as well as isolated nucleic acid molecules encoding such polypeptides.

[0016] The present invention further provides a single or multi-component vaccine comprising one or more of the E. faecalis polynucleotides or polypeptides described in Table 1, or fragments thereof, together with a pharmaceutically acceptable diluent, carrier, or excipient, wherein the E. faecalis polypeptide(s) are present in an amount effective to elicit an immune response to members of the Enterococcus genus, or at least E. faecalis, in an animal. The E. faecalis polypeptides of the present invention may further be combined with one or more immunogens of one or more other Enterococcal or non-Enterococcal organisms to produce a multi-component vaccine intended to elicit an immunological response against members of the Enterococcus genus and, optionally, one or more non-Enterococcal organisms.

[0017] The vaccines of the present invention can be administered in a DNA form, e.g., “naked” DNA, wherein the DNA encodes one or more Enterococcal polypeptides and, optionally, one or more polypeptides of a non-Enterococcal organism. The DNA encoding one or more polypeptides may be constructed such that these polypeptides are expressed as fusion proteins.

[0018] The vaccines of the present invention may also be administered as a component of a genetically engineered organism or host cell. Thus, a genetically engineered organism or host cell which expresses one or more E. faecalis polypeptides may be administered to an animal. For example, such a genetically engineered organism or host cell may contain one or more E. faecalis polypeptides of the present invention intracellularly, on its cell surface, or in its periplasmic space. Further, such a genetically engineered organism or host cell may secrete one or more E. faecalis polypeptides. The vaccines of the present invention may also be co-administered to an animal with an immune system modulator (e.g., CD86 and GM-CSF).

[0019] The invention also provides a method of inducing an immunological response in an animal to one or more members of the Enterococcus genus, preferably one or more isolates of the E. faecalis species, comprising administering to the animal a vaccine as described above.

[0020] The invention further provides a method of inducing a protective immune response in an animal, sufficient to prevent, attenuate, or control an infection by members of the Enterococcus genus, preferably at least E. faecalis species, comprising administering to the animal a composition comprising one or more of the polynucleotides or polypeptides described in Table 1, or fragments thereof. Further, these polypeptides, or fragments thereof, may be conjugated to another immunogen and/or administered in admixture with an adjuvant.

[0021] The invention further relates to antibodies elicited in an animal by the administration of one or more E. faecalis polypeptides of the present invention and to methods for producing such antibodies and fragments thereof. The invention further relates to recombinant antibodies and fragments thereof and to methods for producing such antibodies and fragments thereof.

[0022] The invention also provides diagnostic methods for detecting the expression of the polynucleotides of Table 1 by members of the Enterococcus genus in an animal. One such method involves assaying for the expression of a polynucleotide encoding E. faecalis polypeptides in a sample from an animal. This expression may be assayed either directly (e.g., by assaying polypeptide levels using antibodies elicited in response to amino acid sequences described in Table 1) or indirectly (e.g., by assaying for antibodies having specificity for amino acid sequences described in Table 1). The expression of polynucleotides can also be assayed by detecting the nucleic acids of Table 1. An example of such a method involves the use of the polymerase chain reaction (PCR) to amplify and detect Enterococcus nucleic acid sequences.

[0023] The present invention also relates to nucleic acid probes having all or part of a nucleotide sequence described in Table 1 (odd SEQ ID NOs) which are capable of hybridizing under stringent conditions to Enterococcus nucleic acids. The invention further relates to a method of detecting one or more Enterococcus nucleic acids in a biological sample obtained from an animal, said one or more nucleic acids encoding Enterococcus polypeptides, comprising: (a) contacting the sample with one or more of the above-described nucleic acid probes, under conditions such that hybridization occurs, and (b) detecting hybridization of said one or more probes to the Enterococcus nucleic acid present in the biological sample.

[0024] Other uses of the polypeptides of the present invention include: inter alia, to detect E. aurues in immunoassays, as epitope tags, as molecular weight markers on SDS-PAGE gels, as molecular weight markers for molecular sieve gel filtration columns, to generate antibodies that specificaly bind E. faecalis polypeotides of the present invention for the detection E. faecalis in immunoassays, to generate an immune response against E. faecalis and other Enterococcus species, and as vaccines against E. faecalis, other Enterococcus species and other bacteria genuses.

[0025] Isolated nucleic acid molecules of the present invention, particularly DNA molecules, are useful as probes for gene mapping and for identifying E. faecalis in a biological samples, for instance, by Southern and Northern blot analysis. Polynucleotides of the present invention are also useful in detecting E. faecalis by PCR using primers for a particular E. faecalis polynucleotide. Isolated polynucleotides of the present invention are also useful in making the polypeptides of the present invention.

### DETAILED DESCRIPTION

[0026] The present invention relates to recombinant E. faecalis nucleic acids and fragments thereof. The present invention further relates to recombinant E. faecalis polypeptides and fragments thereof. The invention also relates to methods for using these polypeptides to produce immunological responses and to confer immunological protection to disease caused by members of the genus Enterococcus, at least isolates of the E. faecalis genus. The invention further relates to nucleic acid sequences which encode antigenic E. faecalis polypeptides and to methods for detecting E. faecalis nucleic acids and polypeptides in biological samples. The invention also relates to antibodies specific for the polypeptides and peptides of the present invention and methods for detecting such antibodies produced in a host animal.

[0027] Definitions

[0028] The following definitions are provided to clarify the subject matter which the inventors consider to be the present invention.

[0029] As used herein, the phrase “pathogenic agent” means an agent which causes a disease state or affliction in an animal. Included within this definition, for examples, are bacteria, protozoans, fungi, viruses and metazoan parasites which either produce a disease state or render an animal infected with such an organism susceptible to a disease state (e.g., a secondary infection). Further included are species and strains of the genus Enterococcus which produce disease states in animals.

[0030] As used herein, the term “organism” means any living biological system, including viruses, regardless of whether it is a pathogenic agent.

[0031] As used herein, the term “Enterococcus” means any species or strain of bacteria which is members of the genus Enterococcus. Such species and strains are known to those of skill in the art, and include those that are pathogenic and those that are not.

[0032] As used herein, the phrase “one or more E. faecalis polypeptides of the present invention” means polypeptides comprising the amino acid sequence of one or more of the E. faecalis polypeptides described in Table 1 (even SEQ ID NOs). These polypeptides may be expressed as fusion proteins wherein the E. faecalis polypeptides of the present invention are linked to additional amino acid sequences which may be of Enterococcal or non-Enterococcal origin. This phrase further includes polypeptide comprising fragments of the E. faecalis polypeptides of the present invention. Additional definitions are provided throughout the specification.

[0033] Explanation of Table 1

[0034] Table 1, provided on CD-R and incorporated by reference herein, provides information describing genes which encode polypeptides of E. faecalis. The table lists the gene identifier which consists of the letters EF, which denote E. faecalis, followed immediately by a three digit numeric code, which arbitrarily number the E. faecalis genes of the present invention. A number from 1 through 4 follows the three digit number. A number 1 represents the full length open reading frame of the gene specified by the preceeding three digit number. A number 2 represents the full lenght polypeptide encoded by the gene specified the preceeding three digit number. A number 3 represents a polynucleotide fragment, of the gene represented by the preceeding three digit number, used to produce an antigenic polypeptide. A number 4 represents an antigenic polypeptide fragement, of the gene represented by the preceeding three digit number, used in the to stimulate an immune response or as a vaccine. The nucleotide and amino acid sequences of each gene and fragment are also shown in the Sequence Listing under the SEQ ID NO listed in Table 1.

[0035] Explanation of Table 2

[0036] Table 2 lists accession numbers for the closest matching sequences between the polypeptides of the present invention and those available through GenBank and Derwent databases. These reference numbers are the database entry numbers commonly used by those of skill in the art, who will be familar with their denominations. The descriptions of the numenclature for GenBank are available from the National Center for Biotechnology Information. Column 1 lists the gene or ORF of the present invention. Column 2 lists the accession number of a “match” gene sequence in GenBank or Derwent databases. Column 3 lists the description of the “match” gene sequence. Columns 4 and 5 are the high score and smallest sum probability, respectively, calculated by BLAST. Polypeptides of the present invention that do not share significant identity/similarity with any polypeptide sequences of GenBank and Derwent are not represented in Table 2. Polypeptides of the present invention that share significant identity/similarity with more than one of the polypeptides of GenBank and Derwent are represented more than once.

[0037] Explanation of Table 3

[0038] The E. faecalis polypeptides of the present invention may include one or more conservative amino acid substitutions from natural mutations or human manipulation as indicated in Table 3. Changes are preferably of aminor nature, such as conservative amino acid substitutions that do not significantly affect the folding or activity of the protein. Residues from the following groups, as indicated in Table 3, may be substituted for one another: Aromatic, Hydrophobic, Polar, Basic, Acidic, and Small,

[0039] Explanation of Table 4

[0040] Table 4 lists residues comprising antigenic epitopes of antigenic epitope-bearing fragments present in each of the full length E. faecalis polypeptides described in Table 1 as predicted by the inventors using the algorithm of Jameson and Wolf, (1988) Comp. Appl. Biosci. 4:181-186. The Jameson-Wolf antigenic analysis was performed using the computer program PROTEAN (Version 3.11 for the Power MacIntosh, DNASTAR, Inc., 1228 South Park Street Madison, Wis.). E. faecalis polypeptide shown in Table 1 may one or more antigenic epitopes comprising residues described in Table 4. It will be appreciated that depending on the analytical criteria used to predict antigenic determinants, the exact address of the determinant may vary slightly. The residues and locations shown described in Table 4 correspond to the amino acid sequences for each full length gene sequence shown in Table 1 and in the Sequence Listing. Polypeptides of the present invention that do not have antigenic epitopes recognized by the Jameson-Wolf algorithm are not represented in Table 2.

[0041] Selection of Nucleic Acid Sequences Encoding Antigenic E. faecalis Polypeptides

[0042] Sequenced E. faecalis genomic DNA was obtained from the E. faecalis strain V586. The E. faecalis strain V586 was deposited May 2, 1997 at the ATCC, 10801 University Blvd. Manassas, Va. 20110-2209, and given accession number 55969.

[0043] Some ORFs contained in the subset of fragments of the E. faecalis genome disclosed herein were derived through the use of a number of screening criteria detailed below. The ORFs are bounded at the amino terminus by a methionine or valine residue and usually at the carboxy terminus by a stop codon.

[0044] Most of the selected sequences consist of complete ORFs. The polypeptides that do not comprise a complete ORF can be determined by determining whether the corresponding polynucleotide sequence comprises a stop codon after the codon for the last amino acid residue in the polypeptide sequence. It is not always preferred to express a complete ORF in a heterologous system. It may be challenging to express and purify a highly hydrophobic protein by common laboratory methods. Some of the polypeptide vaccine candidates described herein have been modified slightly to simplify the production of recombinant protein. For example, nucleotide sequences which encode highly hydrophobic domains, such as those found at the amino terminal signal sequence, have been excluded from some constructs used for expression of the polypeptides. Furthermore, any highly hydrophobic amino acid sequences occurring at the carboxy terminus have also been excluded from the recombinant expression constructs. Thus, in one embodiment, a polypeptide which represents a truncated or modified ORF may be used as an antigen.

[0045] While numerous methods are known in the art for selecting potentially immunogenic polypeptides, many of the ORFs disclosed herein were selected on the basis of screening Enterococcus faecalis ORFs for several aspects of potential immunogenicity. One set of selection criteria are as follows:

[0046] 1. Type I signal sequence: An amino terminal type I signal sequence generally directs a nascent protein across the plasma and outer membranes to the exterior of the bacterial cell. Experimental evidence obtained from studies with Escherichia coli suggests that the typical type I signal sequence consists of the following biochemical and physical attributes (Izard, J. W. and Kendall, D. A. Mol. Microbiol. 13:765-773 (1994)). The length of the type I signal sequence is approximately 15 to 25 primarily hydrophobic amino acid residues with a net positive charge in the extreme amino terminus. In addition, the central region of the signal sequence adopts an alpha-helical conformation in a hydrophobic environment. Finally, the region surrounding the actual site of cleavage is ideally six residues long, with small side-chain amino acids in the −1 and −3 positions.

[0047] 2. Type IVsignal sequence: The type IV signal sequence is an example of the several types of functional signal sequences which exist in addition to the type I signal sequence detailed above. Although functionally related, the type IV signal sequence possesses a unique set of biochemical and physical attributes (Strom, M. S. and Lory, S., J. Bacteriol. 174:7345-7351 (1992)). These are typically six to eight amino acids with a net basic charge followed by an additional sixteen to thirty primarily hydrophobic residues. The cleavage site of a type IV signal sequence is typically after the initial six to eight amino acids at the extreme amino terminus. In addition, type IV signal sequences generally contain a phenylalanine residue at the +1 site relative to the cleavage site.

[0048] 3. Lipoprotein: Studies of the cleavage sites of twenty-six bacterial lipoprotein precursors has allowed the definition of a consensus amino acid sequence for lipoprotein cleavage. Nearly three-fourths of the bacterial lipoprotein precursors examined contained the sequence L-(A,S)-(G,A)-C at positions −3 to +1, relative to the point of cleavage (Hayashi, S. and Wu, H. C., J. Bioenerg. Biomembr. 22:451-471 (1990)).

[0049] 4. LPXTG motif: It has been experimentally determined that most anchored proteins found on the surface of gram-positive bacteria possess a highly conserved carboxy terminal sequence. More than fifty such proteins from organisms such as S. pyogenes, S. mutans, E. faecalis, S. pneumoniae, and others, have been identified based on their extracellular location and carboxy terminal amino acid sequence (Fischetti, V. A., ASM News 62:405-410 (1996)). The conserved region consists of six charged amino acids at the extreme carboxy terminus coupled to 15-20 hydrophobic amino acids presumed to function as a transmembrane domain. Immediately adjacent to the transmembrane domain is a six amino acid sequence conserved in nearly all proteins examined. The amino acid sequence of this region is L-P-X-T-G-X (SEQ ID NO:497), where X is any amino acid.

[0050] An algorithm for selecting antigenic and immunogenic Enterococcus faecalis polypeptides including the foregoing criteria was developed. The algorithm is similar to that described in U.S. patent application Ser. No. 08/781,986, filed Jan. 3, 1997, which is fully incorporated by reference herein. Use of the algorithm by the inventors to select immunologically useful Enterococcus faecalis polypeptides resulted in the selection of a number of the disclosed ORFs. Polypeptides comprising the polypeptides identified in this group may be produced by techniques standard in the art and as further described herein.

[0051] Nucleic Acid Molecules

[0052] Sequenced E. faecalis genomic DNA was obtained from the E. faecalis strainV586. As discussed elsewhere herein, polynucleotides of the present invention readily may be obtained by routine application of well known and standard procedures for cloning and sequencing DNA. Detailed methods for obtaining libraries and for sequencing are provided below, for instance. A wide variety of Enterococcus faecalis strains that can be used to prepare E. faecalis genomic DNA for cloning and for obtaining polynucleotides and polypeptides of the present invention. A wide variety of Enterococcus faecalis strains are available to the public from recognized depository institutions, such as the American Type Culture Collection (ATCC). It is recognized that minor variation is the nucleic acid and amino acid sequence may be expected from E faecalis strain to strain. The present invention provides for genes, including both polynucleotides and polypeptides, of the of the present invention from all the Enterococcus faecalis strains.

[0053] Unless otherwise indicated, all nucleotide sequences determined by sequencing a DNA molecule herein were determined using an automated DNA sequencer (such as the Model 373 from Applied Biosystems, Inc., Foster City, Calif.), and all amino acid sequences of polypeptides encoded by DNA molecules determined herein were predicted by translation of a DNA sequence determined as above. Therefore, as is known in the art for any DNA sequence determined by this automated approach, any nucleotide sequence determined herein may contain some errors. Nucleotide sequences determined by automation are typically at least about 90% identical, more typically at least about 95% to at least about 99.9% identical to the actual nucleotide sequence of the sequenced DNA molecule. The actual sequence can be more precisely determined by other approaches including manual DNA sequencing methods well known in the art. As is also known in the art, a single insertion or deletion in a determined nucleotide sequence compared to the actual sequence will cause a frame shift in translation of the nucleotide sequence such that the predicted amino acid sequence encoded by a determined nucleotide sequence will be completely different from the amino acid sequence actually encoded by the sequenced DNA molecule, beginning at the point of such an insertion or deletion. In case of conflict between Table 1 and either the nucleic acid sequence of the clones listed in Table 1 or the amino acid sequence of the protein expressed by the clones listed in Table 1, the clones listed in Table 1 are controlling. By “nucleotide sequence” of a nucleic acid molecule or polynucleotide is intended to mean either a DNA or RNA sequence. Using the information provided herein, such as the nucleotide sequence in Table 1, a nucleic acid molecule of the present invention encoding a E. faecalis polypeptide may be obtained using standard cloning and screening procedures, such as those for cloning DNAs using genomic DNA as starting material. See, e.g., Sambrook et al. MOLECULAR CLONING: A LABORATORY MANUAL (Cold Spring Harbor, N.Y. 2nd ed. 1989); Ausubel et al., CURRENT PROTOCALS IN MOLECULAR BIOLOGY (John Wiley and Sons, N.Y. 1989). Illustrative of the invention, the nucleic acid molecule described in Table 1 was discovered in a DNA library derived from a E. faecalis genomic DNA.

[0054] Nucleic acid molecules of the present invention may be in the form of RNA, such as mRNA, or in the form of DNA, including, for instance, DNA and genomic DNA obtained by cloning or produced synthetically. The DNA may be double-stranded or single-stranded. Single-stranded DNA or RNA may be the coding strand, also known as the sense strand, or it may be the non-coding strand, also referred to as the anti-sense strand.

[0055] By “isolated” nucleic acid molecule(s) is intended a nucleic acid molecule, DNA or RNA, which has been removed from its native environment. This includes segments of DNA comprising the E. faecalis polynucleotides of the present invention isolated from the native chromosome. These fragments include both isolated fragments consisting only of E. faecalis DNA and fragments comprising heterologous sequences such as vector sequences or other foreign DNA. For example, recombinant DNA molecules contained in a vector are considered isolated for the purposes of the present invention. Further examples of isolated DNA molecules include recombinant DNA molecules maintained in heterologous host cells or purified (partially or substantially) DNA molecules in solution. Isolated RNA molecules include in vivo or in vitro RNA transcripts of the DNA molecules of the present invention. Isolated nucleic acid molecules according to the present invention further include such molecules produced synthetically.

[0056] In addition, isolated nucleic acid molecules of the invention include DNA molecules which comprise a sequence substantially different from those described above but which, due to the degeneracy of the genetic code, still encode a E. faecalis polypeptides and peptides of the present invention (e.g. polypeptides of Table 1). That is, all possible DNA sequences that encode the E. faecalis polypeptides of the present invention. This includes the genetic code and species-specific codon preferences known in the art. Thus, it would be routine for one skilled in the art to generate the degenerate variants described above, for instance, to optimize codon expression for a particular host (e.g., change codons in the bacteria mRNA to those preferred by a mammalian or other bacterial host such as E. coli).

[0057] The invention further provides isolated nucleic acid molecules having the nucleotide sequence shown in Table 1 or a nucleic acid molecule having a sequence complementary to one of the above sequences. Such isolated molecules, particularly DNA molecules, are useful as probes for gene mapping and for identifying E. faecalis in a biological sample, for instance, by PCR, Southern blot, Northern blot, or other form of hybridization analysis.

[0058] The present invention is further directed to nucleic acid molecules encoding portions or fragments of the nucleotide sequences described herein. Fragments include portions of the nucleotide sequences of Table 1, or the E. faecalis nucleotide sequences contained in the plasmid clones listed in Table 1, at least 10 contiguous nucleotides in length selected from any two integers, one of which representing a 5′ nucleotide position and a second of which representing a 3′ nucleotide position, where the first nucleotide for each nucleotide sequence in Table 1 is position 1. That is, every combination of a 5′ and 3′ nucleotide position that a fragment at least 10 contiguous nucleotides in length could occupy is included in the invention. At least means a fragment may be 10 contiguous nucleotide bases in length or any integer between 10 and the length of an entire nucleotide sequence of Table 1 minus 1. Therefore, included in the invention are contiguous fragments specified by any 5′ and 3′ nucleotide base positions of a nucleotide sequences of Table 1 wherein the contiguous fragment is any integer between 10 and the length of an entire nucleotide sequence minus 1.

[0059] Further, the invention includes polynucleotides comprising fragments specified by size, in nucleotides, rather than by nucleotide positions. The invention includes any fragment size, in contiguous nucleotides, selected from integers between 10 and the length of an entire nucleotide sequence minus 1. Preferred sizes of contiguous nucleotide fragments include 20 nucleotides, 30 nucleotides, 40 nucleotides, 50 nucleotides. Other preferred sizes of contiguous nucleotide fragments, which may be useful as diagnostic probes and primers, include fragments 50-300 nucleotides in length which include, as discussed above, fragment sizes representing each integer between 50-300. Larger fragments are also useful according to the present invention corresponding to most, if not all, of the nucleotide sequences shown in Table 1 or of the E. faecalis nucleotide sequences of the plasmid clones listed in Table 1. The preferred sizes are, of course, meant to exemplify not limit the present invention as all size fragments, representing any integer between 10 and the length of an entire nucleotide sequence minus 1, are included in the invention. Additional preferred nucleic acid fragments of the present invention include nucleic acid molecules encoding epitope-bearing portions of E. faecalis polypeptides identified in Table 4.

[0060] The present invention also provides for the exclusion of any fragment, specified by 5′ and 3′ base positions or by size in nucleotide bases as described above for any nucleotide sequence of Table 1 or the plasmid clones listed in Table 1. Any number of fragments of nucleotide sequences in Table 1 or the plasmid clones listed in Table 1, specified by 5′ and 3′ base positions or by size in nucleotides, as described above, may be excluded from the present invention.

[0061] In another aspect, the invention provides an isolated nucleic acid molecule comprising a polynucleotide which hybridizes under stringent hybridization conditions to a portion of a polynucleotide in a nucleic acid molecules of the invention described above, for instance, nucleotide sequences of Table 1 or the E. faecalis sequences of the plasmid clones listed in Table 1. By “stringent hybridization conditions” is intended overnight incubation at 42° C. in a solution comprising: 50% formamide, 5× SSC (750 mM NaCl, 75 mM trisodium citrate), 50 mM sodium phosphate (pH 7.6), 5× Denhardt's solution, 10% dextran sulfate, and 20 μg/ml denatured, sheared salmon sperm DNA, followed by washing the filters in 0.1× SSC at about 65° C.

[0062] By a polynucleotide which hybridizes to a “portion” of a polynucleotide is intended a polynucleotide (either DNA or RNA) hybridizing to at least about 15 nucleotides bases, and more preferably at least about 20 nucleotides bases, still more preferably at least about 30 nucleotides bases, and even more preferably about 30-70 (e.g., 50) nucleotides bases of the reference polynucleotide. These are useful as diagnostic probes and primers as discussed above. By a portion of a polynucleotide of “at least 20 nucleotides bases in length,” for example, is intended 20 or more contiguous nucleotides bases nucleotides from the nucleotide sequence of the reference polynucleotide (e.g., the nucleotide sequence as shown in Table 1). Portions of a polynucleotide which hybridizes to a nucleotide sequence in Table 1, which can be used as probes and primers, may also be precisely specified by 5′ and 3′ base positions or by size in nucleotide bases as described above or precisely excluded in the same manner.

[0063] The nucleic acid molecules of the present invention include those encoding the full length E. faecalis polypeptides of Table 1 and portions of the E. faecalis polypeptides of Table 1. Also included in the present invention are nucleic acids encoding the above full length sequences and further comprise additional sequences, such as those encoding an added secretory leader sequence, such as a pre-, or pro- or prepro- protein sequence. Further included in the present invention are nucleic acids encoding the above full length sequences and portions thereof and further comprise additional heterologous amino acid sequences encoded by nucleic acid sequences from a different source.

[0064] Also included in the present invention are nucleic acids encoding the above protein sequences together with additional, non-coding sequences, including for example, but not limited to non-coding 5′ and 3′ sequences. These sequences include transcribed, non-translated sequences that may play a role in transcription, and mRNA processing, for example, ribosome binding and stability of mRNA. Also included in the present invention are additional coding sequences which provide additional functionalities.

[0065] Thus, a nucleotide sequence encoding a polypeptide may be fused to a marker sequence, such as a sequence encoding a peptide which facilitates purification of the fused polypeptide. In certain preferred embodiments of this aspect of the invention, the marker amino acid sequence is a hexa-histidine peptide, such as the tag provided in a pQE vector (QIAGEN, Inc., 9259 Eton Avenue, Chatsworth, Calif., 91311), among others, many of which are commercially available. For instance, hexa-histidine provides for convenient purification of the fusion protein. See Gentz et al. (1989) Proc. Natl. Acad. Sci. 86:821-24. The “HA” tag is another peptide useful for purification which corresponds to an epitope derived from the influenza hemagglutinin protein. See Wilson et al. (1984) Cell 37:767. As discussed below, other such fusion proteins include the E. faecalis polypeptides of the present invention fused to Fc at the N- or C-terminus.

[0066] Variant and Mutant Polynucleotides

[0067] The present invention further relates to variants of the nucleic acid molecules which encode portions, analogs or derivatives of a E. faecalis polypeptides of Table 1 and variant polypeptides thereof including portions, analogs, and derivatives of the E. faecalis polypeptides. Variants may occur naturally, such as a natural allelic variant. By an “allelic variant” is intended one of several alternate forms of a gene occupying a given locus on a chromosome of an organism. See, e.g., B. Lewin, Genes IV (1990). Non-naturally occurring variants may be produced using art-known mutagenesis techniques.

[0068] Such nucleic acid variants include those produced by nucleotide substitutions, deletions, or additions. The substitutions, deletions, or additions may involve one or more nucleotides. The variants may be altered in coding regions, non-coding regions, or both. Alterations in the coding regions may produce conservative or non-conservative amino acid substitutions, deletions or additions. Especially preferred among these are silent substitutions, additions and deletions, which do not alter the properties and activities of a E. faecalis protein of the present invention or portions thereof. Also especially preferred in this regard are conservative substitutions.

[0069] Such polypeptide variants include those produced by amino acid substitutions, deletions or additions. The substitutions, deletions, or additions may involve one or more residues. Alterations may produce conservative or non-conservative amino acid substitutions, deletions, or additions. Especially preferred among these are silent substitutions, additions and deletions, which do not alter the properties and activities of a E. faecalis protein of the present invention or portions thereof. Also especially preferred in this regard are conservative substitutions.

[0070] The present invention also relates to recombinant vectors, which include the isolated nucleic acid molecules of the present invention, and to host cells containing the recombinant vectors, as well as to methods of making such vectors and host cells and for using them for production of E. faecalis polypeptides or peptides by recombinant techniques.

[0071] The present application is directed to nucleic acid molecules at least 90%, 95%, 96%, 97%, 98% or 99% identical to a nucleic acid sequence shown in Table 1. The above nucleic acid sequences are included irrespective of whether they encode a polypeptide having E. faecalis activity. This is because even where a particular nucleic acid molecule does not encode a polypeptide having E. faecalis activity, one of skill in the art would still know how to use the nucleic acid molecule, for instance, as a hybridization probe. Uses of the nucleic acid molecules of the present invention that do not encode a polypeptide having E. faecalis activity include, inter alia, isolating an E. faecalis gene or allelic variants thereof from a DNA library, and detecting E. faecalis mRNA expression samples, environmental samples, suspected of containing E. faecalis by Northern Blot analysis.

[0072] Preferred, are nucleic acid molecules having sequences at least 90%, 95%, 96%, 97%, 98% or 99% identical to the nucleic acid sequence shown in Table 1, which do, in fact, encode a polypeptide having E. faecalis protein activity By “a polypeptide having E. faecalis activity” is intended polypeptides exhibiting activity similar, but not necessarily identical, to an activity of the E. faecalis protein of the invention, as measured in a particular biological assay suitable for measuring activity of the specified protein.

[0073] Due to the degeneracy of the genetic code, one of ordinary skill in the art will immediately recognize that a large number of the nucleic acid molecules having a sequence at least 90%, 95%, 96%, 97%, 98%, or 99% identical to the nucleic acid sequences shown in Table 1 will encode a polypeptide having E. faecalis protein activity. In fact, since degenerate variants of these nucleotide sequences all encode the same polypeptide, this will be clear to the skilled artisan even without performing the above described comparison assay. It will be further recognized in the art that, for such nucleic acid molecules that are not degenerate variants, a reasonable number will also encode a polypeptide having E. faecalis protein activity. This is because the skilled artisan is fully aware of amino acid substitutions that are either less likely or not likely to significantly effect protein function (e.g., replacing one aliphatic amino acid with a second aliphatic amino acid), as further described below.

[0074] The biological activity or function of the polypeptides of the present invention are expected to be similar or identical to polypeptides from other bacteria that share a high degree of structural identity/similarity. Tables 2 lists accession numbers and descriptions for the closest matching sequences of polypeptides available through Genbank and Derwent databases. It is therefore expected that the biological activity or function of the polypeptides of the present invention will be similar or identical to those polypeptides from other bacterial genuses, species, or strains listed in Table 2.

[0075] By a polynucleotide having a nucleotide sequence at least, for example, 95% “identical” to a reference nucleotide sequence of the present invention, it is intended that the nucleotide sequence of the polynucleotide is identical to the reference sequence except that the polynucleotide sequence may include up to five point mutations per each 100 nucleotides of the reference nucleotide sequence encoding the E. faecalis polypeptide. In other words, to obtain a polynucleotide having a nucleotide sequence at least 95% identical to a reference nucleotide sequence, up to 5% of the nucleotides in the reference sequence may be deleted, inserted, or substituted with another nucleotide. The query sequence may be an entire sequence shown in Table 1, the ORF (open reading frame), or any fragment specified as described herein.

[0076] As a practical matter, whether any particular nucleic acid molecule or polypeptide is at least 90%, 95%, 96%, 97%, 98% or 99% identical to a nucleotide sequence of the presence invention can be determined conventionally using known computer programs. A preferred method for determining the best overall match between a query sequence (a sequence of the present invention) and a subject sequence, also referred to as a global sequence alignment, can be determined using the FASTDB computer program based on the algorithm of Brutlag et al. See Brutlag et al. (1990) Comp. App. Biosci. 6:237-245. In a sequence alignment the query and subject sequences are both DNA sequences. An RNA sequence can be compared by first converting U's to T's. The result of said global sequence alignment is in percent identity. Preferred parameters used in a FASTDB alignment of DNA sequences to calculate percent identity are: Matrix=Unitary, k-tuple=4, Mismatch Penalty=1, Joining Penalty=30, Randomization Group Length=0, Cutoff Score=1, Gap Penalty=5, Gap Size Penalty 0.05, Window Size=500 or the length of the subject nucleotide sequence, whichever is shorter.

[0077] If the subject sequence is shorter than the query sequence because of 5′ or 3′ deletions, not because of internal deletions, a manual correction must be made to the results. This is because the FASTDB program does not account for 5′ and 3′ truncations of the subject sequence when calculating percent identity. For subject sequences truncated at the 5′ or 3′ ends, relative to the query sequence, the percent identity is corrected by calculating the number of bases of the query sequence that are 5′ and 3′ of the subject sequence, which are not matched/aligned, as a percent of the total bases of the query sequence. Whether a nucleotide is matched/aligned is determined by results of the FASTDB sequence alignment. This percentage is then subtracted from the percent identity, calculated by the above FASTDB program using the specified parameters, to arrive at a final percent identity score. This corrected score is what is used for the purposes of the present invention. Only nucleotides outside the 5′ and 3′ nucleotides of the subject sequence, as displayed by the FASTDB alignment, which are not matched/aligned with the query sequence, are calculated for the purposes of manually adjusting the percent identity score.

[0078] For example, a 90 nucleotide subject sequence is aligned to a 100 nucleotide query sequence to determine percent identity. The deletions occur at the 5′ end of the subject sequence and therefore, the FASTDB alignment does not show a matched/alignment of the first 10 nucleotides at 5′ end. The 10 unpaired nucleotides represent 10% of the sequence (number of nucleotides at the 5′ and 3′ ends not matched/total number of nucleotides in the query sequence) so 10% is subtracted from the percent identity score calculated by the FASTDB program. If the remaining 90 nucleotides were perfectly matched the final percent identity would be 90%. In another example, a 90 nucleotide subject sequence is compared with a 100 nucleotide query sequence. This time the deletions are internal deletions so that there are no nucleotides on the 5′ or 3′ of the subject sequence which are not matched/aligned with the query. In this case the percent identity calculated by FASTDB is not manually corrected. Once again, only nucleotides 5′ and 3′ of the subject sequence which are not matched/aligned with the query sequence are manually corrected for. No other manual corrections are to made for the purposes of the present invention.

[0079] Vectors and Host Cell

[0080] The present invention also relates to vectors which include the isolated DNA molecules of the present invention, host cells comprising the recombinant vectors, and the production of E. faecalis polypeptides and peptides of the present invention expressed by the host cells.

[0081] Recombinant constructs may be introduced into host cells using well known techniques such as infection, transduction, transfection, transvection, electroporation and transformation. The vector may be, for example, a phage, plasmid, viral or retroviral vector. Retroviral vectors may be replication competent or replication defective. In the latter case, viral propagation generally will occur only in complementing host cells.

[0082] The polynucleotides may be joined to a vector containing a selectable marker for propagation in a host. Generally, a plasmid vector is introduced in a precipitate, such as a calcium phosphate precipitate, or in a complex with a charged lipid. If the vector is a virus, it may be packaged in vitro using an appropriate packaging cell line and then transduced into host cells.

[0083] Preferred are vectors comprising cis-acting control regions to the polynucleotide of interest. Appropriate trans-acting factors may be supplied by the host, supplied by a complementing vector or supplied by the vector itself upon introduction into the host.

[0084] In certain preferred embodiments in this regard, the vectors provide for specific expression, which may be inducible and/or cell type-specific. Particularly preferred among such vectors are those inducible by environmental factors that are easy to manipulate, such as temperature and nutrient additives.

[0085] Expression vectors useful in the present invention include chromosomal-, episomal- and virus-derived vectors, e.g., vectors derived from bacterial plasmids, bacteriophage, yeast episomes, yeast chromosomal elements, viruses such as baculoviruses, papova viruses, vaccinia viruses, adenoviruses, fowl pox viruses, pseudorabies viruses and retroviruses, and vectors derived from combinations thereof, such as cosmids and phagemids.

[0086] The DNA insert should be operatively linked to an appropriate promoter, such as the phage lambda PL promoter, the E. coli lac, trp and tac promoters, the SV40 early and late promoters and promoters of retroviral LTRs, to name a few. Other suitable promoters will be known to the skilled artisan. The expression constructs will further contain sites for transcription initiation, termination and, in the transcribed region, a ribosome binding site for translation. The coding portion of the mature transcripts expressed by the constructs will preferably include a translation initiating site at the beginning and a termination codon (UAA, UGA or UAG) appropriately positioned at the end of the polypeptide to be translated.

[0087] As indicated, the expression vectors will preferably include at least one selectable marker. Such markers include dihydrofolate reductase or neomycin resistance for eukaryotic cell culture and tetracycline, kanamycin, or ampicillin resistance genes for culturing in E. coli and other bacteria. Representative examples of appropriate hosts include, but are not limited to, bacterial cells, such as E. coli, Streptomyces and Salmonella typhimurium cells; fungal cells, such as yeast cells; insect cells such as Drosophila S2 and Spodoptera Sf9 cells; animal cells such as CHO, COS and Bowes melanoma cells; and plant cells. Appropriate culture mediums and conditions for the above-described host cells are known in the art.

[0088] Among vectors preferred for use in bacteria include pQE70, pQE60 and pQE9, pQE1O available from Qiagen; pBS vectors, Phagescript vectors, Bluescript vectors, pNH8A, pNH16a, pNH18A, pNH46A available from Stratagene; pET series of vectors available from Novagen; and ptrc99a, pKK223-3, pKK233-3, pDR540, pRIT5 available from Pharmacia. Among preferred eukaryotic vectors are pWLNEO, pSV2CAT, pOG44, pXT1 and pSG available from Stratagene; and pSVK3, pBPV, pMSG and pSVL available from Pharmacia. Other suitable vectors will be readily apparent to the skilled artisan.

[0089] Among known bacterial promoters suitable for use in the present invention include the E. coli lacI and lacZ promoters, the T3, T5 and T7 promoters, the gpt promoter, the lambda PR and PL promoters and the trp promoter. Suitable eukaryotic promoters include the CMV immediate early promoter, the HSV thymidine kinase promoter, the early and late SV40 promoters, the promoters of retroviral LTRs, such as those of the Rous sarcoma virus (RSV), and metallothionein promoters, such as the mouse metallothionein-I promoter.

[0090] Introduction of the construct into the host cell can be effected by calcium phosphate transfection, DEAE-dextran mediated transfection, cationic lipid-mediated transfection, electroporation, transduction, infection or other methods. Such methods are described in many standard laboratory manuals (for example, Davis, et al., Basic Methods In Molecular Biology (1986)).

[0091] Transcription of DNA encoding the polypeptides of the present invention by higher eukaryotes may be increased by inserting an enhancer sequence into the vector. Enhancers are cis-acting elements of DNA, usually about from 10 to 300 nucleotides that act to increase transcriptional activity of a promoter in a given host cell-type. Examples of enhancers include the SV40 enhancer, which is located on the late side of the replication origin at nucleotides 100 to 270, the cytomegalovirus early promoter enhancer, the polyoma enhancer on the late side of the replication origin, and adenovirus enhancers.

[0092] For secretion of the translated polypeptide into the lumen of the endoplasmic reticulum, into the periplasmic space or into the extracellular environment, appropriate secretion signals may be incorporated into the expressed polypeptide, for example, the amino acid sequence KDEL. The signals may be endogenous to the polypeptide or they may be heterologous signals.

[0093] The polypeptide may be expressed in a modified form, such as a fusion protein, and may include not only secretion signals, but also additional heterologous functional regions. For instance, a region of additional amino acids, particularly charged amino acids, may be added to the N-terminus of the polypeptide to improve stability and persistence in the host cell, during purification, or during subsequent handling and storage. Also, peptide moieties may be added to the polypeptide to facilitate purification. Such regions may be removed prior to final preparation of the polypeptide. The addition of peptide moieties to polypeptides to engender secretion or excretion, to improve stability and to facilitate purification, among others, are familiar and routine techniques in the art. A preferred fusion protein comprises a heterologous region from immunoglobulin that is useful to solubilize proteins. For example, EP-A-O 464 533 (Canadian counterpart 2045869) discloses fusion proteins comprising various portions of constant region of immunoglobulin molecules together with another human protein or part thereof. In many cases, the Fc part in a fusion protein is thoroughly advantageous for use in therapy and diagnosis and thus results, for example, in improved pharmacokinetic properties (EP-A 0232 262). On the other hand, for some uses it would be desirable to be able to delete the Fc part after the fusion protein has been expressed, detected and purified in the advantageous manner described. This is the case when Fc portion proves to be a hindrance to use in therapy and diagnosis, for example when the fusion protein is to be used as antigen for immunizations. In drug discovery, for example, human proteins, such as, hIL5-receptor has been fused with Fc portions for the purpose of high-throughput screening assays to identify antagonists of hIL-5. See Bennett, D. et al. (1995) J. Molec. Recogn. 8:52-58 and Johanson, K. et al. (1995) J. Biol. Chem. 270 (16):9459-9471.

[0094] The E. faecalis polypeptides can be recovered and purified from recombinant cell cultures by well-known methods including ammonium sulfate or ethanol precipitation, acid extraction, anion or cation exchange chromatography, phosphocellulose chromatography, hydrophobic interaction chromatography, affinity chromatography, hydroxylapatite chromatography, lectin chromatography and high performance liquid chromatography (“HPLC”) is employed for purification. Polypeptides of the present invention include naturally purified products, products of chemical synthetic procedures, and products produced by recombinant techniques from a prokaryotic or eukaryotic host, including, for example, bacterial, yeast, higher plant, insect and mammalian cells.

[0095] Polypeptides and Fragments

[0096] The invention further provides an isolated E. faecalis polypeptide having an amino acid sequence in Table 1, or a peptide or polypeptide comprising a portion of the above polypeptides.

[0097] Variant and Mutant Polypeptides

[0098] To improve or alter the characteristics of E. faecalis polypeptides of the present invention, protein engineering may be employed. Recombinant DNA technology known to those skilled in the art can be used to create novel mutant proteins or muteins including single or multiple amino acid substitutions, deletions, additions, or fusion proteins. Such modified polypeptides can show, e.g., enhanced activity or increased stability. In addition, they may be purified in higher yields and show better solubility than the corresponding natural polypeptide, at least under certain purification and storage conditions.

[0099] N-Terminal and C-Terminal Deletion Mutants

[0100] It is known in the art that one or more amino acids may be deleted from the N-terminus or C-terminus without substantial loss of biological function. For instance, Ron et al. J. Biol. Chem., 268:2984-2988 (1993), reported modified KGF proteins that had heparin binding activity even if 3, 8, or 27 N-terminal amino acid residues were missing. Accordingly, the present invention provides polypeptides having one or more residues deleted from the amino terminus of the amino acid sequence of the E. faecalis polypeptides shown in Table 1, and polynucleotides encoding such polypeptides.

[0101] Similarly, many examples of biologically functional C-terminal deletion muteins are known. For instance, Interferon gamma shows up to ten times higher activities by deleting 8-10 amino acid residues from the carboxy terminus of the protein See, e.g., Dobeli, et al. (1988) J. Biotechnology 7:199-216. Accordingly, the present invention provides polypeptides having one or more residues from the carboxy terminus of the amino acid sequence of the E. faecalis polypeptides shown in Table 1. The invention also provides polypeptides having one or more amino acids deleted from both the amino and the carboxyl termini as described below.

[0102] The present invention is further directed to polynucleotide encoding portions or fragments of the amino acid sequences described herein as well as to portions or fragments of the isolated amino acid sequences described herein. Fragments include portions of the amino acid sequences of Table 1, are at least 5 contiguous amino acid in length, are selected from any two integers, one of which representing a N-terminal position. The initiation codon of the polypeptides of the present inventions position 1. Every combination of a N-terminal and C-terminal position that a fragment at least 5 contiguous amino acid residues in length could occupy, on any given amino acid sequence of Table 1 is included in the invention. At least means a fragment may be 5 contiguous amino acid residues in length or any integer between 5 and the number of residues in a full length amino acid sequence minus 1. Therefore, included in the invention are contiguous fragments specified by any N-terminal and C-terminal positions of amino acid sequence set forth in Table 1 wherein the contiguous fragment is any integer between 5 and the number of residues in a full length sequence minus 1.

[0103] Further, the invention includes polypeptides comprising fragments specified by size, in amino acid residues, rather than by N-terminal and C-terminal positions. The invention includes any fragment size, in contiguous amino acid residues, selected from integers between 5 and the number of residues in a full length sequence minus 1. Preferred sizes of contiguous polypeptide fragments include about 5 amino acid residues, about 10 amino acid residues, about 20 amino acid residues, about 30 amino acid residues, about 40 amino acid residues, about 50 amino acid residues, about 100 amino acid residues, about 200 amino acid residues, about 300 amino acid residues, and about 400 amino acid residues. The preferred sizes are, of course, meant to exemplify, not limit, the present invention as all size fragments representing any integer between 5 and the number of residues in a full length sequence minus 1 are included in the invention. The present invention also provides for the exclusion of any fragments specified by N-terminal and C-terminal positions or by size in amino acid residues as described above. Any number of fragments specified by N-terminal and C-terminal positions or by size in amino acid residues as described above may be excluded.

[0104] The above fragments need not be active since they would be useful, for example, in immunoassays, in epitope mapping, epitope tagging, to generate antibodies to a particular portion of the protein, as vaccines, and as molecular weight markers.

[0105] Other Mutants

[0106] In addition to N- and C-terminal deletion forms of the protein discussed above, it also will be recognized by one of ordinary skill in the art that some amino acid sequences of the E. faecalis polypeptide can be varied without significant effect of the structure or function of the protein. If such differences in sequence are contemplated, it should be remembered that there will be critical areas on the protein which determine activity.

[0107] Thus, the invention further includes variations of the E. faecalis polypeptides which show substantial E. faecalis polypeptide activity or which include regions of E. faecalis protein such as the protein portions discussed below. Such mutants include deletions, insertions, inversions, repeats, and type substitutions selected according to general rules known in the art so as to have little effect on activity. For example, guidance concerning how to make phenotypically silent amino acid substitutions is provided. There are two main approaches for studying the tolerance of an amino acid sequence to change. See, Bowie, J. U. et al. (1990), Science 247:1306-1310. The first method relies on the process of evolution, in which mutations are either accepted or rejected by natural selection. The second approach uses genetic engineering to introduce amino acid changes at specific positions of a cloned gene and selections or screens to identify sequences that maintain functionality.

[0108] These studies have revealed that proteins are surprisingly tolerant of amino acid substitutions. The studies indicate which amino acid changes are likely to be permissive at a certain position of the protein. For example, most buried amino acid residues require nonpolar side chains, whereas few features of surface side chains are generally conserved. Other such phenotypically silent substitutions are described by Bowie et al. (supra) and the references cited therein. Typically seen as conservative substitutions are the replacements, one for another, among the aliphatic amino acids Ala, Val, Leu and Ile; interchange of the hydroxyl residues Ser and Thr, exchange of the acidic residues Asp and Glu, substitution between the amide residues Asn and Gln, exchange of the basic residues Lys and Arg and replacements among the aromatic residues Phe, Tyr.

[0109] Thus, the fragment, derivative, analog, or homolog of the polypeptide of Table 1, or that encoded by the plasmids listed in Table 1, may be: (i) one in which one or more of the amino acid residues are substituted with a conserved or non-conserved amino acid residue (preferably a conserved amino acid residue) and such substituted amino acid residue may or may not be one encoded by the genetic code: or (ii) one in which one or more of the amino acid residues includes a substituent group: or (iii) one in which the E. faecalis polypeptide is fused with another compound, such as a compound to increase the half-life of the polypeptide (for example, polyethylene glycol): or (iv) one in which the additional amino acids are fused to the above form of the polypeptide, such as an IgG Fc fusion region peptide or leader or secretory sequence or a sequence which is employed for purification of the above form of the polypeptide or a proprotein sequence. Such fragments, derivatives and analogs are deemed to be within the scope of those skilled in the art from the teachings herein.

[0110] Thus, the E. faecalis polypeptides of the present invention may include one or more amino acid substitutions, deletions, or additions, either from natural mutations or human manipulation. As indicated, changes are preferably of aminor nature, such as conservative amino acid substitutions that do not significantly affect the folding or activity of the protein (see Table 3).

[0111] Amino acids in the E. faecalis proteins of the present invention that are essential for function can be identified by methods known in the art, such as site-directed mutagenesis or alanine-scanning mutagenesis. See, e.g., Cunningham et al. (1989) Science 244:1081-1085. The latter procedure introduces single alanine mutations at every residue in the molecule. The resulting mutant molecules are then tested for biological activity using assays appropriate for measuring the function of the particular protein.

[0112] Of special interest are substitutions of charged amino acids with other charged or neutral amino acids which may produce proteins with highly desirable improved characteristics, such as less aggregation. Aggregation may not only reduce activity but also be problematic when preparing pharmaceutical formulations, because aggregates can be immunogenic. See, e.g., Pinckard et al., (1967) Clin. Exp. Immunol. 2:331-340; Robbins, et al., (1987) Diabetes 36:838-845; Cleland, et al., (1993) Crit. Rev. Therapeutic Drug Carrier Systems 10:307-377.

[0113] The polypeptides of the present invention are preferably provided in an isolated form, and preferably are substantially purified. A recombinantly produced version of the E. faecalis polypeptide can be substantially purified by the one-step method described by Smith et al. (1988) Gene 67:31-40. Polypeptides of the invention also can be purified from natural or recombinant sources using antibodies directed against the polypeptides of the invention in methods which are well known in the art of protein purification.

[0114] The invention further provides for isolated E. faecalis polypeptides comprising an amino acid sequence selected from the group consisting of: (a) the amino acid sequence of a full-length E. faecalis polypeptide having the complete amino acid sequence shown in Table 1; (b) the amino acid sequence of a full-length E. faecalis polypeptide having the complete amino acid sequence shown in Table 1 excepting the N-terminal methionine; (c) the complete amino acid sequence encoded by the plasmids listed in Table 1; and (d) the complete amino acid sequence excepting the N-terminal methionine encoded by the plasmids listed in Table 1. The polypeptides of the present invention also include polypeptides having an amino acid sequence at least 80% identical, more preferably at least 90% identical, and still more preferably 95%, 96%, 97%, 98% or 99% identical to those described in (a), (b), (c), and (d) above.

[0115] Further polypeptides of the present invention include polypeptides which have at least 90% similarity, more preferably at least 95% similarity, and still more preferably at least 96%, 97%, 98% or 99% similarity to those described above.

[0116] A further embodiment of the invention relates to a polypeptide which comprises the amino acid sequence of a E. faecalis polypeptide having an amino acid sequence which contains at least one conservative amino acid substitution, but not more than 50 conservative amino acid substitutions, not more than 40 conservative amino acid substitutions, not more than 30 conservative amino acid substitutions, and not more than 20 conservative amino acid substitutions. Also provided are polypeptides which comprise the amino acid sequence of a E. faecalis polypeptide, having at least one, but not more than 10, 9, 8, 7, 6, 5, 4, 3, 2 or 1 conservative amino acid substitutions.

[0117] By a polypeptide having an amino acid sequence at least, for example, 95% “identical” to a query amino acid sequence of the present invention, it is intended that the amino acid sequence of the subject polypeptide is identical to the query sequence except that the subject polypeptide sequence may include up to five amino acid alterations per each 100 amino acids of the query amino acid sequence. In other words, to obtain a polypeptide having an amino acid sequence at least 95% identical to a query amino acid sequence, up to 5% of the amino acid residues in the subject sequence may be inserted, deleted, (indels) or substituted with another amino acid. These alterations of the reference sequence may occur at the amino or carboxy terminal positions of the reference amino acid sequence or anywhere between those terminal positions, interspersed either individually among residues in the reference sequence or in one or more contiguous groups within the reference sequence.

[0118] As a practical matter, whether any particular polypeptide is at least 90%, 95%, 96%, 97%, 98% or 99% identical to, for instance, the amino acid sequences shown in Table 1 or to the amino acid sequence encoded by the plasmids listed in Table 1 can be determined conventionally using known computer programs. A preferred method for determining the best overall match between a query sequence (a sequence of the present invention) and a subject sequence, also referred to as a global sequence alignment, can be determined using the FASTDB computer program based on the algorithm of Brutlag et al., (1990) Comp. App. Biosci. 6:237-245. In a sequence alignment the query and subject sequences are both amino acid sequences. The result of said global sequence alignment is in percent identity. Preferred parameters used in a FASTDB amino acid alignment are: Matrix=PAM 0, k-tuple=2, Mismatch Penalty=1, Joining Penalty=20, Randomization Group Length=0, Cutoff Score=1, Window Size=sequence length, Gap Penalty=5, Gap Size Penalty=0.05, Window Size=500 or the length of the subject amino acid sequence, whichever is shorter.

[0119] If the subject sequence is shorter than the query sequence due to N- or C-terminal deletions, not because of internal deletions, the results, in percent identity, must be manually corrected. This is because the FASTDB program does not account for N- and C-terminal truncations of the subject sequence when calculating global percent identity. For subject sequences truncated at the N- and C-termini, relative to the query sequence, the percent identity is corrected by calculating the number of residues of the query sequence that are N- and C-terminal of the subject sequence, which are not matched/aligned with a corresponding subject residue, as a percent of the total bases of the query sequence. Whether a residue is matched/aligned is determined by results of the FASTDB sequence alignment. This percentage is then subtracted from the percent identity, calculated by the above FASTDB program using the specified parameters, to arrive at a final percent identity score. This final percent identity score is what is used for the purposes of the present invention. Only residues to the N- and C-termini of the subject sequence, which are not matched/aligned with the query sequence, are considered for the purposes of manually adjusting the percent identity score. That is, only query amino acid residues outside the farthest N- and C-terminal residues of the subject sequence.

[0120] For example, a 90 amino acid residue subject sequence is aligned with a 100 residue query sequence to determine percent identity. The deletion occurs at the N-terminus of the subject sequence and therefore, the FASTDB alignment does not match/align with the first 10 residues at the N-terminus. The 10 unpaired residues represent 10% of the sequence (number of residues at the N- and C-termini not matched/total number of residues in the query sequence) so 10% is subtracted from the percent identity score calculated by the FASTDB program. If the remaining 90 residues were perfectly matched the final percent identity would be 90%. In another example, a 90 residue subject sequence is compared with a 100 residue query sequence. This time the deletions are internal so there are no residues at the N- or C-termini of the subject sequence which are not matched/aligned with the query. In this case the percent identity calculated by FASTDB is not manually corrected. Once again, only residue positions outside the N- and C-terminal ends of the subject sequence, as displayed in the FASTDB alignment, which are not matched/aligned with the query sequence are manually corrected. No other manual corrections are to made for the purposes of the present invention.

[0121] The above polypeptide sequences are included irrespective of whether they have their normal biological activity. This is because even where a particular polypeptide molecule does not have biological activity, one of skill in the art would still know how to use the polypeptide, for instance, as a vaccine or to generate antibodies. Other uses of the polypeptides of the present invention that do not have E. faecalis activity include, inter alia, as epitope tags, in epitope mapping, and as molecular weight markers on SDS-PAGE gels or on molecular sieve gel filtration columns using methods known to those of skill in the art.

[0122] As described below, the polypeptides of the present invention can also be used to raise polyclonal and monoclonal antibodies, which are useful in assays for detecting E. faecalis protein expression or as agonists and antagonists capable of enhancing or inhibiting E. faecalis protein function. Further, such polypeptides can be used in the yeast two-hybrid system to “capture” E. faecalis protein binding proteins which are also candidate agonists and antagonists according to the present invention. See, e.g., Fields et al. (1989) Nature 340:245-246.

[0123] Epitope-Bearing Portions

[0124] In another aspect, the invention provides peptides and polypeptides comprising epitope-bearing portions of the E. faecalis polypeptides of the present invention. These epitopes are immunogenic or antigenic epitopes of the polypeptides of the present invention. An “immunogenic epitope” is defined as a part of a protein that elicits an antibody response when the whole protein or polypeptide is the immunogen. These immunogenic epitopes are believed to be confined to a few loci on the molecule. On the other hand, a region of a protein molecule to which an antibody can bind is defined as an “antigenic determinant” or “antigenic epitope.” The number of immunogenic epitopes of a protein generally is less than the number of antigenic epitopes. See, e.g., Geysen, et al. (1983) Proc. Natl. Acad. Sci. USA 81:3998-4002. Predicted antigenic epitopes are shown in Table 4, below. It is pointed out that Table 4 only lists amino acid residues comprising epitopes predicted to have the highest degree of antigenicity. The polypeptides not listed in Table 4 and portions of polypeptides not listed in Table 4 are not considered non-antigenic. This is because they may still be antigenic in vivo but merely not recognized as such by the particular algorithm used. Thus, Table 4 lists the amino acid residues comprising preferred antigenic epitopes but not a complete list. Amino acid residues comprising other antigenic epitopes may be determined by algorithms similar to the Jameson-Wolf analysis or by in vivo testing for an antigenic response using the methods described herein or those known in the art.

[0125] As to the selection of peptides or polypeptides bearing an antigenic epitope (i.e., that contain a region of a protein molecule to which an antibody can bind), it is well known in that art that relatively short synthetic peptides that mimic part of a protein sequence are routinely capable of eliciting an antiserum that reacts with the partially mimicked protein. See, e.g., Sutcliffe, et al., (1983) Science 219:660-666. Peptides capable of eliciting protein-reactive sera are frequently represented in the primary sequence of a protein, can be characterized by a set of simple chemical rules, and are confined neither to immunodominant regions of intact proteins (i.e., immunogenic epitopes) nor to the amino or carboxyl terminals. Peptides that are extremely hydrophobic and those of six or fewer residues generally are ineffective at inducing antibodies that bind to the mimicked protein; longer, peptides, especially those containing proline residues, usually are effective. See, Sutcliffe, et al., supra, p. 661. For instance, 18 of 20 peptides designed according to these guidelines, containing 8-39 residues covering 75% of the sequence of the influenza virus hemagglutinin HA1 polypeptide chain, induced antibodies that reacted with the HA1 protein or intact virus; and 12/12 peptides from the MuLV polymerase and 18/18 from the rabies glycoprotein induced antibodies that precipitated the respective proteins.

[0126] Antigenic epitope-bearing peptides and polypeptides of the invention are therefore useful to raise antibodies, including monoclonal antibodies, that bind specifically to a polypeptide of the invention. Thus, a high proportion of hybridomas obtained by fusion of spleen cells from donors immunized with an antigen epitope-bearing peptide generally secrete antibody reactive with the native protein. See Sutcliffe, et al., supra, p. 663. The antibodies raised by antigenic epitope-bearing peptides or polypeptides are useful to detect the mimicked protein, and antibodies to different peptides may be used for tracking the fate of various regions of a protein precursor which undergoes post-translational processing. The peptides and anti-peptide antibodies may be used in a variety of qualitative or quantitative assays for the mimicked protein, for instance in competition assays since it has been shown that even short peptides (e.g., about 9 amino acids) can bind and displace the larger peptides in immunoprecipitation assays. See, e.g., Wilson, et al., (1984) Cell 37:767-778. The anti-peptide antibodies of the invention also are useful for purification of the mimicked protein, for instance, by adsorption chromatography using methods known in the art.

[0127] Antigenic epitope-bearing peptides and polypeptides of the invention designed according to the above guidelines preferably contain a sequence of at least seven, more preferably at least nine and most preferably between about 10 to about 50 amino acids (i.e. any integer between 7 and 50) contained within the amino acid sequence of a polypeptide of the invention. However, peptides or polypeptides comprising a larger portion of an amino acid sequence of a polypeptide of the invention, containing about 50 to about 100 amino acids, or any length up to and including the entire amino acid sequence of a polypeptide of the invention, also are considered epitope-bearing peptides or polypeptides of the invention and also are useful for inducing antibodies that react with the mimicked protein. Preferably, the amino acid sequence of the epitope-bearing peptide is selected to provide substantial solubility in aqueous solvents (i.e., the sequence includes relatively hydrophilic residues and highly hydrophobic sequences are preferably avoided); and sequences containing proline residues are particularly preferred.

[0128] Non-limiting examples of antigenic polypeptides or peptides that can be used to generate an enterococcal-specific immune response or antibodies include portions of the amino acid sequences identified in Table 1. More specifically, Table 4 discloses a list of non-limiting residues that are involved in the antigenicity of the epitope-bearing fragments of the present invention. Therefore, the present inventions provides for isolated and purified antigenic epitope-bearing fragments of the polypeptides of the present invention comprising a peptide sequences of Table 4. The antigenic epitope-bearing fragments comprising a peptide sequence of Table 4 preferably contain a sequence of at least seven, more preferably at least nine and most preferably between about 10 to about 50 amino acids (i.e. any integer between 7 and 50) of a polypeptide of the present invention. That is, included in the present invention are antigenic polypeptides between the integers of 7 and 50 amino acid in length comprising one or more of the sequences of Table 4. Therefore, in most cases, the polypeptides of Table 4 make up only a portion of the antigenic polypeptide. All combinations of sequences between the integers of 7 and 50 amino acid in length comprising one or more of the sequences of Table 4 are included. The antigenic epitope-bearing fragments may be specified by either the number of contiguous amino acid residues or by specific N-terminal and C-terminal positions as described above for the polypeptide fragments of the present invention, wherein the initiation codon is residue 1. Any number of the described antigenic epitope-bearing fragments of the present invention may also be excluded from the present invention in the same manner.

[0129] The epitope-bearing peptides and polypeptides of the invention may be produced by any conventional means for making peptides or polypeptides including recombinant means using nucleic acid molecules of the invention. For instance, an epitope-bearing amino acid sequence of the present invention may be fused to a larger polypeptide which acts as a carrier during recombinant production and purification, as well as during immunization to produce anti-peptide antibodies. Epitope-bearing peptides also may be synthesized using known methods of chemical synthesis. For instance, Houghten has described a simple method for synthesis of large numbers of peptides, such as 10-20 mg of 248 different 13 residue peptides representing single amino acid variants of a segment of the HA1 polypeptide which were prepared and characterized (by ELISA-type binding studies) in less than four weeks (Houghten, R. A. Proc. Natl. Acad. Sci. USA 82:5131-5135 (1985)). This “Simultaneous Multiple Peptide Synthesis (SMPS)” process is further described in U.S. Pat. No. 4,631,211 to Houghten and coworkers (1986). In this procedure the individual resins for the solid-phase synthesis of various peptides are contained in separate solvent-permeable packets, enabling the optimal use of the many identical repetitive steps involved in solid-phase methods. A completely manual procedure allows 500-1000 or more syntheses to be conducted simultaneously (Houghten et al. (1985) Proc. Natl. Acad. Sci. 82:5131-5135 at 5134.

[0130] Epitope-bearing peptides and polypeptides of the invention are used to induce antibodies according to methods well known in the art. See, e.g., Sutcliffe, et al., supra;; Wilson, et al., supra;; and Bittle, et al. (1985) J. Gen. Virol. 66:2347-2354. Generally, animals may be immunized with free peptide; however, anti-peptide antibody titer may be boosted by coupling of the peptide to a macromolecular carrier, such as keyhole limpet hemacyanin (KLH) or tetanus toxoid. For instance, peptides containing cysteine may be coupled to carrier using a linker such as m-malcimidobenzoyl-N-hydroxysuccinimide ester (MBS), while other peptides may be coupled to carrier using a more general linking agent such as glutaraldehyde. Animals such as rabbits, rats and mice are immunized with either free or carrier-coupled peptides, for instance, by intraperitoneal and/or intradermal injection of emulsions containing about 100 μg peptide or carrier protein and Freund's adjuvant. Several booster injections may be needed, for instance, at intervals of about two weeks, to provide a useful titer of anti-peptide antibody which can be detected, for example, by ELISA assay using free peptide adsorbed to a solid surface. The titer of anti-peptide antibodies in serum from an immunized animal may be increased by selection of anti-peptide antibodies, for instance, by adsorption to the peptide on a solid support and elution of the selected antibodies according to methods well known in the art.

[0131] Immunogenic epitope-bearing peptides of the invention, i.e., those parts of a protein that elicit an antibody response when the whole protein is the immunogen, are identified according to methods known in the art. For instance, Geysen, et al., supra, discloses a procedure for rapid concurrent synthesis on solid supports of hundreds of peptides of sufficient purity to react in an ELISA. Interaction of synthesized peptides with antibodies is then easily detected without removing them from the support. In this manner a peptide bearing an immunogenic epitope of a desired protein may be identified routinely by one of ordinary skill in the art. For instance, the immunologically important epitope in the coat protein of foot-and-mouth disease virus was located by Geysen et al. supra with a resolution of seven amino acids by synthesis of an overlapping set of all 208 possible hexapeptides covering the entire 213 amino acid sequence of the protein. Then, a complete replacement set of peptides in which all 20 amino acids were substituted in turn at every position within the epitope were synthesized, and the particular amino acids conferring specificity for the reaction with antibody were determined. Thus, peptide analogs of the epitope-bearing peptides of the invention can be made routinely by this method. U.S. Pat. No. 4,708,781 to Geysen (1987) further describes this method of identifying a peptide bearing an immunogenic epitope of a desired protein.

[0132] Further still, U.S. Pat. No. 5,194,392, to Geysen (1990), describes a general method of detecting or determining the sequence of monomers (amino acids or other compounds) which is a topological equivalent of the epitope (i.e., a “mimotope”) which is complementary to a particular paratope (antigen binding site) of an antibody of interest. More generally, U.S. Pat. No. 4,433,092, also to Geysen (1989), describes a method of detecting or determining a sequence of monomers which is a topographical equivalent of a ligand which is complementary to the ligand binding site of a particular receptor of interest. Similarly, U.S. Pat. No. 5,480,971 to Houghten, R. A. et al. (1996) discloses linear C₁-C₇-alkyl peralkylated oligopeptides and sets and libraries of such peptides, as well as methods for using such oligopeptide sets and libraries for determining the sequence of a peralkylated oligopeptide that preferentially binds to an acceptor molecule of interest. Thus, non-peptide analogs of the epitope-bearing peptides of the invention also can be made routinely by these methods. The entire disclosure of each document cited in this section on “Polypeptides and Fragments” is hereby incorporated herein by reference.

[0133] As one of skill in the art will appreciate, the polypeptides of the present invention and the epitope-bearing fragments thereof described above can be combined with parts of the constant domain of immunoglobulins (IgG), resulting in chimeric polypeptides. These fusion proteins facilitate purification and show an increased half-life in vivo. This has been shown, e.g., for chimeric proteins consisting of the first two domains of the human CD4-polypeptide and various domains of the constant regions of the heavy or light chains of mammalian immunoglobulins. (EPA 0,394,827; Traunecker et al. (1988) Nature 331:84-86. Fusion proteins that have a disulfide-linked dimeric structure due to the IgG part can also be more efficient in binding and neutralizing other molecules than a monomeric E. faecalis polypeptide or fragment thereof alone. See Fountoulakis et al. (1995) J. Biochem. 270:3958-3964. Nucleic acids encoding the above epitopes of E. faecalis polypeptides can also be recombined with a gene of interest as an epitope tag to aid in detection and purification of the expressed polypeptide.

[0134] Antibodies

[0135] E. faecalis protein-specific antibodies for use in the present invention can be raised against the intact E. faecalis protein or an antigenic polypeptide fragment thereof, which may be presented together with a carrier protein, such as an albumin, to an animal system (such as rabbit or mouse) or, if it is long enough (at least about 25 amino acids), without a carrier.

[0136] As used herein, the term “antibody” (Ab) or “monoclonal antibody” (Mab) is meant to include intact molecules, single chain whole antibodies, and antibody fragments. Antibody fragments of the present invention include Fab and F(ab′)2 and other fragments including single-chain Fvs (scFv) and disulfide-linked Fvs (sdFv). Also included in the present invention are chimeric and humanized monoclonal antibodies and polyclonal antibodies specific for the polypeptides of the present invention. The antibodies of the present invention may be prepared by any of a variety of methods. For example, cells expressing a polypeptide of the present invention or an antigenic fragment thereof can be administered to an animal in order to induce the production of sera containing polyclonal antibodies. For example, a preparation of E. faecalis polypeptide or fragment thereof is prepared and purified to render it substantially free of natural contaminants. Such a preparation is then introduced into an animal in order to produce polyclonal antisera of greater specific activity.

[0137] In a preferred method, the antibodies of the present invention are monoclonal antibodies or binding fragments thereof. Such monoclonal antibodies can be prepared using hybridoma technology. See, e.g., Harlow et al., ANTIBODIES: A LABORATORY MANUAL, (Cold Spring Harbor Laboratory Press, 2nd ed. 1988); Hammerling, et al., in: MONOCLONAL ANTIBODIES AND T-CELL HYBRIDOMAS 563-681 (Elsevier, N.Y., 1981). Fab and F(ab′)2 fragments may be produced by proteolytic cleavage, using enzymes such as papain (to produce Fab fragments) or pepsin (to produce F(ab′)₂ fragments). Alternatively, E. faecalis polypeptide-binding fragments, chimeric, and humanized antibodies can be produced through the application of recombinant DNA technology or through synthetic chemistry using methods known in the art.

[0138] Alternatively, additional antibodies capable of binding to the polypeptide antigen of the present invention may be produced in a two-step procedure through the use of anti-idiotypic antibodies. Such a method makes use of the fact that antibodies are themselves antigens, and that, therefore, it is possible to obtain an antibody which binds to a second antibody. In accordance with this method, E. faecalis polypeptide-specific antibodies are used to immunize an animal, preferably a mouse. The splenocytes of such an animal are then used to produce hybridoma cells, and the hybridoma cells are screened to identify clones which produce an antibody whose ability to bind to the E. faecalis polypeptide-specific antibody can be blocked by the E. faecalis polypeptide antigen. Such antibodies comprise anti-idiotypic antibodies to the E. faecalis polypeptide-specific antibody and can be used to immunize an animal to induce formation of further E. faecalis polypeptide-specific antibodies.

[0139] Antibodies and fragments thereof of the present invention may be described by the portion of a polypeptide of the present invention recognized or specifically bound by the antibody. Antibody binding fragments of a polypeptide of the present invention may be described or specified in the same manner as for polypeptide fragments discussed above., i.e, by N-terminal and C-terminal positions or by size in contiguous amino acid residues. Any number of antibody binding fragments, of a polypeptide of the present invention, specified by N-terminal and C-terminal positions or by size in amino acid residues, as described above, may also be excluded from the present invention. Therefore, the present invention includes antibodies the specifically bind a particularly described fragment of a polypeptide of the present invention and allows for the exclusion of the same.

[0140] Antibodies and fragments thereof of the present invention may also be described or specified in terms of their cross-reactivity. Antibodies and fragments that do not bind polypeptides of any other species of Enterococcus other than E. faecalis are included in the present invention. Likewise, antibodies and fragments that bind only species of Enterococcus, i.e. antibodies and fragments that do not bind bacteria from any genus other than Enterococcus, are included in the present invention.

[0141] Diagnostic Assays

[0142] The present invention further relates to methods for assaying enterococcal infection in an animal by detecting the expression of genes encoding enterococcal polypeptides of the present invention. The methods comprise analyzing tissue or body fluid from the animal for Enterococcus-specific antibodies, nucleic acids, or proteins. Analysis of nucleic acid specific to Enterococcus is assayed by PCR or hybridization techniques using nucleic acid sequences of the present invention as either hybridization probes or primers. See, e.g., Sambrook et al. Molecular cloning: A Laboratory Manual (Cold Spring Harbor Laboratory Press, 2nd ed., 1989, page 54 reference); Eremeeva et al. (1994) J. Clin. Microbiol. 32:803-810 (describing differentiation among spotted fever group Rickettsiae species by analysis of restriction fragment length polymorphism of PCR-amplified DNA) and Chen et al. 1994 J. Clin. Microbiol. 32:589-595 (detecting B. burgdorferi nucleic acids via PCR).

[0143] Where diagnosis of a disease state related to infection with Enterococcus has already been made, the present invention is useful for monitoring progression or regression of the disease state whereby patients exhibiting enhanced Enterococcus gene expression will experience a worse clinical outcome relative to patients expressing these gene(s) at a lower level.

[0144] By “biological sample” is intended any biological sample obtained from an animal, cell line, tissue culture, or other source which contains Enterococcus polypeptide, mRNA, or DNA. Biological samples include body fluids (such as saliva, blood, plasma, urine, mucus, synovial fluid, etc.) tissues (such as muscle, skin, and cartilage) and any other biological source suspected of containing Enterococcus polypeptides or nucleic acids. Methods for obtaining biological samples such as tissue are well known in the art.

[0145] The present invention is useful for detecting diseases related to Enterococcus infections in animals. Preferred animals include monkeys, apes, cats, dogs, birds, cows, pigs, mice, horses, rabbits and humans. Particularly preferred are humans.

[0146] Total RNA can be isolated from a biological sample using any suitable technique such as the single-step guanidinium-thiocyanate-phenol-chloroform method described in Chomczynski et al. (1987) Anal. Biochem. 162:156-159. mRNA encoding Enterococcus polypeptides having sufficient homology to the nucleic acid sequences identified in Table 1 to allow for hybridization between complementary sequences are then assayed using any appropriate method. These include Northern blot analysis, SI nuclease mapping, the polymerase chain reaction (PCR), reverse transcription in combination with the polymerase chain reaction (RT-PCR), and reverse transcription in combination with the ligase chain reaction (RT-LCR).

[0147] Northern blot analysis can be performed as described in Harada et al. (1990) Cell 63:303-312. Briefly, total RNA is prepared from a biological sample as described above. For the Northern blot, the RNA is denatured in an appropriate buffer (such as glyoxal/dimethyl sulfoxide/sodium phosphate buffer), subjected to agarose gel electrophoresis, and transferred onto a nitrocellulose filter. After the RNAs have been linked to the filter by a UV linker, the filter is prehybridized in a solution containing formamide, SSC, Denhardt's solution, denatured salmon sperm, SDS, and sodium phosphate buffer. A E. faecalis polynucleotide sequence shown in Table 1 labeled according to any appropriate method (such as the ³²P-multiprimed DNA labeling system (Amersham)) is used as probe. After hybridization overnight, the filter is washed and exposed to x-ray film. DNA for use as probe according to the present invention is described in the sections above and will preferably at least 15 nucleotides in length.

[0148] S1 mapping can be performed as described in Fujita et al. (1987) Cell 49:357-367. To prepare probe DNA for use in S1 mapping, the sense strand of an above-described E. faecalis DNA sequence of the present invention is used as a template to synthesize labeled antisense DNA. The antisense DNA can then be digested using an appropriate restriction endonuclease to generate further DNA probes of a desired length. Such antisense probes are useful for visualizing protected bands corresponding to the target mRNA (i.e., mRNA encoding Enterococcus polypeptides).

[0149] Levels of mRNA encoding Enterococcus polypeptides are assayed, for e.g., using the RT-PCR method described in Makino et al. (1990) Technique 2:295-301. By this method, the radioactivities of the “amplicons” in the polyacrylamide gel bands are linearly related to the initial concentration of the target mRNA. Briefly, this method involves adding total RNA isolated from a biological sample in a reaction mixture containing a RT primer and appropriate buffer. After incubating for primer annealing, the mixture can be supplemented with a RT buffer, dNTPs, DTT, RNase inhibitor and reverse transcriptase. After incubation to achieve reverse transcription of the RNA, the RT products are then subject to PCR using labeled primers. Alternatively, rather than labeling the primers, a labeled dNTP can be included in the PCR reaction mixture. PCR amplification can be performed in a DNA thermal cycler according to conventional techniques. After a suitable number of rounds to achieve amplification, the PCR reaction mixture is electrophoresed on a polyacrylamide gel. After drying the gel, the radioactivity of the appropriate bands (corresponding to the mRNA encoding the Enterococcus polypeptides of the present invention) are quantified using an imaging analyzer. RT and PCR reaction ingredients and conditions, reagent and gel concentrations, and labeling methods are well known in the art. Variations on the RT-PCR method will be apparent to the skilled artisan. Other PCR methods that can detect the nucleic acid of the present invention can be found in PCR PRIMER: A LABORATORY MANUAL (C. W. Dieffenbach et al. eds., Cold Spring Harbor Lab Press, 1995).

[0150] The polynucleotides of the present invention, including both DNA and RNA, may be used to detect polynucleotides of the present invention or Enterococcal species including E. faecalis using bio chip technology. The present invention includes both high density chip arrays (>1000 oligonucleotides per cm²) and low density chip arrays (<1000 oligonucleotides per Cm²). Bio chips comprising arrays of polynucleotides of the present invention may be used to detect Enterococcal species, including E. faecalis, in biological and environmental samples and to diagnose an animal, including humans, with an E. faecalis or other Enterococcal infection. The bio chips of the present invention may comprise polynucleotide sequences of other pathogens including bacteria, viral, parasitic, and fungal polynucleotide sequences, in addition to the polynucleotide sequences of the present invention, for use in rapid differential pathogenic detection and diagnosis. The bio chips can also be used to monitor an E. faecalis or other Enterococcal infections and to monitor the genetic changes (deletions, insertions, mismatches, etc.) in response to drug therapy in the clinic and drug development in the laboratory. The bio chip technology comprising arrays of polynucleotides of the present invention may also be used to simultaneously monitor the expression of a multiplicity of genes, including those of the present invention. The polynucleotides used to comprise a selected array may be specified in the same manner as for the fragments, i.e, by their 5′ and 3′ positions or length in contiguous base pairs and include from. Methods and particular uses of the polynucleotides of the present invention to detect Enterococcal species, including E. faecalis, using bio chip technology include those known in the art and those of: U.S. Pat. Nos. 5,510,270, 5,545,531, 5445934, 5677195, 5532128, 5556752, 5527681, 5451683, 5424186, 5607646, 5658732 and World Patent Nos. WO/9710365, WO/9511995, WO/9743447, WO/9535505, each incorporated herein in their entireties.

[0151] Biosensors using the polynucleotides of the present invention may also be used to detect, diagnose, and monitor E. faecalis or other Enterococcal species and infections thereof. Biosensors using the polynucleotides of the present invention may also be used to detect particular polynucleotides of the present invention. Biosensors using the polynucleotides of the present invention may also be used to monitor the genetic changes (deletions, insertions, mismatches, etc.) in response to drug therapy in the clinic and drug development in the laboratory. Methods and particular uses of the polynucleotides of the present invention to detect Enterococcal species, including E. faecalis, using biosensors include those known in the art and those of: U.S. Pat. Nos. 5,721,102, 5,658,732, 5631170, and World Patent Nos. WO97/3501 1, WO/9720203, each incorporated herein in their entireties.

[0152] Thus, the present invention includes both bio chips and biosensors comprising polynucleotides of the present invention and methods of their use.

[0153] Assaying Enterococcus polypeptide levels in a biological sample can occur using any art-known method, such as antibody-based techniques. For example, Enterococcus polypeptide expression in tissues can be studied with classical immunohistological methods. In these, the specific recognition is provided by the primary antibody (polyclonal or monoclonal) but the secondary detection system can utilize fluorescent, enzyme, or other conjugated secondary antibodies. As a result, an immunohistological staining of tissue section for pathological examination is obtained. Tissues can also be extracted, e.g., with urea and neutral detergent, for the liberation of Enterococcus polypeptides for Westem-blot or dot/slot assay. See, e.g., Jalkanen, M. et al. (1985) J. Cell. Biol. 101:976-985; Jalkanen, M. et al. (1987) J. Cell . Biol. 105:3087-3096. In this technique, which is based on the use of cationic solid phases, quantitation of a Enterococcus polypeptide can be accomplished using an isolated Enterococcus polypeptide as a standard. This technique can also be applied to body fluids.

[0154] Other antibody-based methods useful for detecting Enterococcus polypeptide gene expression include immunoassays, such as the ELISA and the radioimmunoassay (RIA). For example, a Enterococcus polypeptide-specific monoclonal antibodies can be used both as an immunoabsorbent and as an enzyme-labeled probe to detect and quantify a Enterococcus polypeptide. The amount of a Enterococcus polypeptide present in the sample can be calculated by reference to the amount present in a standard preparation using a linear regression computer algorithm. Such an ELISA is described in lacobelli et al. (1988) Breast Cancer Research and Treatment 11:19-30. In another ELISA assay, two distinct specific monoclonal antibodies can be used to detect Enterococcus polypeptides in a body fluid. In this assay, one of the antibodies is used as the immunoabsorbent and the other as the enzyme-labeled probe.

[0155] The above techniques may be conducted essentially as a “one-step” or “two-step” assay. The “one-step” assay involves contacting the Enterococcus polypeptide with immobilized antibody and, without washing, contacting the mixture with the labeled antibody. The “two-step” assay involves washing before contacting the mixture with the labeled antibody. Other conventional methods may also be employed as suitable. It is usually desirable to immobilize one component of the assay system on a support, thereby allowing other components of the system to be brought into contact with the component and readily removed from the sample. Variations of the above and other immunological methods included in the present invention can also be found in Harlow et al., ANTIBODIES: A LABORATORY MANUAL, (Cold Spring Harbor Laboratory Press, 2nd ed. 1988).

[0156] Suitable enzyme labels include, for example, those from the oxidase group, which catalyze the production of hydrogen peroxide by reacting with substrate. Glucose oxidase is particularly preferred as it has good stability and its substrate (glucose) is readily available. Activity of an oxidase label may be assayed by measuring the concentration of hydrogen peroxide formed by the enzyme-labeled antibody/substrate reaction. Besides enzymes, other suitable labels include radioisotopes, such as iodine (¹²⁵I, ¹²¹I), carbon (¹⁴C), sulphur (³⁵S), tritium (³H), indium (¹¹²In), and technetium (^{99m}Tc), and fluorescent labels, such as fluorescein and rhodamine, and biotin.

[0157] Further suitable labels for the Enterococcus polypeptide-specific antibodies of the present invention are provided below. Examples of suitable enzyme labels include malate dehydrogenase, Enterococcal nuclease, delta-5-steroid isomerase, yeast-alcohol dehydrogenase, alpha-glycerol phosphate dehydrogenase, triose phosphate isomerase, peroxidase, alkaline phosphatase, asparaginase, glucose oxidase, beta-galactosidase, ribonuclease, urease, catalase, glucose-6-phosphate dehydrogenase, glucoamylase, and acetylcholine esterase.

[0158] Examples of suitable radioisotopic labels include ³H, ¹¹¹In, ¹²⁵I, ¹³¹I, ³²P, ³⁵S, ¹⁴C, ⁵¹Cr, ⁵⁷To, ⁵⁸Co, ⁵⁹Fe, ⁷⁵Se, ¹⁵²Eu, ⁹⁰Y, ⁶⁷Cu, ²¹⁷Ci, ²¹¹At ²¹²Pb, ⁴⁷Sc, ¹⁰⁹Pd, etc. ¹¹¹In is a preferred isotope where in vivo imaging is used since its avoids the problem of dehalogenation of the ¹²⁵I or ¹³¹I-labeled monoclonal antibody by the liver. In addition, this radionucleotide has a more favorable gamma emission energy for imaging. See, e.g., Perkins et al. (1985) Eur. J. Nucl. Med. 10:296-301; Carasquillo et al. (1987) J. Nucl. Med. 28:281-287. For example, ¹¹¹ In coupled to monoclonal antibodies with 1-(P-isothiocyanatobenzyl)-DPTA has shown little uptake in non-tumors tissues, particularly the liver, and therefore enhances specificity of tumor localization. See, Esteban et al. (1987) J. Nucl. Med. 28:861-870.

[0159] Examples of suitable non-radioactive isotopic labels include ¹⁵⁷Gd, ⁵⁵Mn, ¹⁶²Dy, ⁵²Tr, and ⁵⁶Fe.

[0160] Examples of suitable fluorescent labels include an ¹⁵²Eu label, a fluorescein label, an isothiocyanate label, a rhodamine label, a phycoerythrin label, a phycocyanin label, an allophycocyanin label, an o-phthaldehyde label, and a fluorescamine label.

[0161] Examples of suitable toxin labels include, Pseudomonas toxin, diphtheria toxin, ricin, and cholera toxin.

[0162] Examples of chemiluminescent labels include a luminal label, an isoluminal label, an aromatic acridinium ester label, an imidazole label, an acridinium salt label, an oxalate ester label, a luciferin label, a luciferase label, and an aequorin label.

[0163] Examples of nuclear magnetic resonance contrasting agents include heavy metal nuclei such as Gd, Mn, and iron.

[0164] Typical techniques for binding the above-described labels to antibodies are provided by Kennedy et al. (1976) Clin. Chim. Acta 70:1-31, and Schurs et al. (1977) Clin. Chim. Acta 81:1-40. Coupling techniques mentioned in the latter are the glutaraldehyde method, the periodate method, the dimaleimide method, the m-maleimidobenzyl-N-hydroxy-succinimide ester method, all of which methods are incorporated by reference herein.

[0165] In a related aspect, the invention includes a diagnostic kit for use in screening serum containing antibodies specific against E. faecalis infection. Such a kit may include an isolated E. faecalis antigen comprising an epitope which is specifically immunoreactive with at least one anti-E. faecalis antibody. Such a kit also includes means for detecting the binding of said antibody to the antigen. In specific embodiments, the kit may include a recombinantly produced or chemically synthesized peptide or polypeptide antigen. The peptide or polypeptide antigen may be attached to a solid support.

[0166] In a more specific embodiment, the detecting means of the above-described kit includes a solid support to which said peptide or polypeptide antigen is attached. Such a kit may also include a non-attached reporter-labeled anti-human antibody. In this embodiment, binding of the antibody to the E. faecalis antigen can be detected by binding of the reporter labeled antibody to the anti-E. faecalis polypeptide antibody.

[0167] In a related aspect, the invention includes a method of detecting E. faecalis infection in a subject. This detection method includes reacting a body fluid, preferably serum, from the subject with an isolated E. faecalis antigen, and examining the antigen for the presence of bound antibody. In a specific embodiment, the method includes a polypeptide antigen attached to a solid support, and serum is reacted with the support. Subsequently, the support is reacted with a reporter-labeled anti-human antibody. The support is then examined for the presence of reporter-labeled antibody.

[0168] The solid surface reagent employed in the above assays and kits is prepared by known techniques for attaching protein material to solid support material, such as polymeric beads, dip sticks, 96-well plates or filter material. These attachment methods generally include non-specific adsorption of the protein to the support or covalent attachment of the protein , typically through a free amine group, to a chemically reactive group on the solid support, such as an activated carboxyl, hydroxyl, or aldehyde group. Alternatively, streptavidin coated plates can be used in conjunction with biotinylated antigen(s).

[0169] The polypeptides and antibodies of the present invention, including fragments thereof, may be used to detect Enterococcal species including E. faecalis using bio chip and biosensor technology. Bio chip and biosensors of the present invention may comprise the polypeptides of the present invention to detect antibodies, which specifically recognize Enterococcal species, including E. faecalis. Bio chip and biosensors of the present invention may also comprise antibodies which specifically recognize the polypeptides of the present invention to detect Enterococcal species, including E. faecalis or specific polypeptides of the present invention. Bio chips or biosensors comprising polypeptides or antibodies of the present invention may be used to detect Enterococcal species, including E. faecalis, in biological and environmental samples and to diagnose an animal, including humans, with an E. faecalis or other Enterococcal infection. Thus, the present invention includes both bio chips and biosensors comprising polypeptides or antibodies of the present invention and methods of their use.

[0170] The bio chips of the present invention may further comprise polypeptide sequences of other pathogens including bacteria, viral, parasitic, and fungal polypeptide sequences, in addition to the polypeptide sequences of the present invention, for use in rapid differential pathogenic detection and diagnosis. The bio chips of the present invention may further comprise antibodies or fragments thereof specific for other pathogens including bacteria, viral, parasitic, and fungal polypeptide sequences, in addition to the antibodies or fragments thereof of the present invention, for use in rapid differential pathogenic detection and diagnosis. The bio chips and biosensors of the present invention may also be used to monitor an E. faecalis or other Enterococcal infection and to monitor the genetic changes (amino acid deletions, insertions, substitutions, etc.) in response to drug therapy in the clinic and drug development in the laboratory. The bio chip and biosensors comprising polypeptides or antibodies of the present invention may also be used to simultaneously monitor the expression of a multiplicity of polypeptides, including those of the present invention. The polypeptides used to comprise a bio chip or biosensor of the present invention may be specified in the same manner as for the fragments, i.e, by their N-terminal and C-terminal positions or length in contiguous amino acid residue. Methods and particular uses of the polypeptides and antibodies of the present invention to detect Enterococcal species, including E. faecalis, or specific polypeptides using bio chip and biosensor technology include those known in the art, those of the U.S. Patent Nos. and World Patent Nos. listed above for bio chips and biosensors using polynucleotides of the present invention, and those of: U.S. Pat. Nos. 5,658,732, 5,135,852, 5567301, 5677196, 5690894 and World Patent Nos. WO9729366, WO9612957, each incorporated herein in their entireties.

[0171] Treatment:

[0172] Agonists and Antagonists—Assays and Molecules

[0173] The invention also provides a method of screening compounds to identify those which enhance or block the biological activity of the E. faecalis polypeptides of the present invention. The present invention further provides where the compounds kill or slow the growth of E. faecalis . The ability of E. faecalis antagonists, including E. faecalis ligands, to prophylactically or therapeutically block antibiotic resistance may be easily tested by the skilled artisan. See, e.g., Straden et al. (1997) J Bacteriol. 179(1):9-16.

[0174] An agonist is a compound which increases the natural biological function or which functions in a manner similar to the polypeptides of the present invention, while antagonists decrease or eliminate such functions. Potential antagonists include small organic molecules, peptides, polypeptides, and antibodies that bind to a polypeptide of the invention and thereby inhibit or extinguish its activity.

[0175] The antagonists may be employed for instance to inhibit peptidoglycan cross bridge formation. Antibodies against E. faecalis may be employed to bind to and inhibit E. faecalis activity to treat antibiotic resistance. Any of the above antagonists may be employed in a composition with a pharmaceutically acceptable carrier.

[0176] Vaccines

[0177] The present invention also provides vaccines comprising one or more polypeptides of the present invention. Heterogeneity in the composition of a vaccine may be provided by combining E. faecalis polypeptides of the present invention. Multi-component vaccines of this type are desirable because they are likely to be more effective in eliciting protective immune responses against multiple species and strains of the Enterococcus genus than single polypeptide vaccines.

[0178] Multi-component vaccines are known in the art to elicit antibody production to numerous immunogenic components. See, e.g., Decker et al. (1996) J. Infect. Dis. 174:S270-275. In addition, a hepatitis B, diphtheria, tetanus, pertussis tetravalent vaccine has recently been demonstrated to elicit protective levels of antibodies in human infants against all four pathogenic agents. See, e.g., Aristegui, J. et al. (1997) Vaccine 15:7-9.

[0179] The present invention in addition to single-component vaccines includes multi-component vaccines. These vaccines comprise more than one polypeptide, immunogen or antigen. Thus, a multi-component vaccine would be a vaccine comprising more than one of the E. faecalis polypeptides of the present invention.

[0180] Further within the scope of the invention are whole cell and whole viral vaccines. Such vaccines may be produced recombinantly and involve the expression of one or more of the E. faecalis polypeptides described in Table 1. For example, the E. faecalis polypeptides of the present invention may be either secreted or localized intracellular, on the cell surface, or in the periplasmic space. Further, when a recombinant virus is used, the E. faecalis polypeptides of the present invention may, for example, be localized in the viral envelope, on the surface of the capsid, or internally within the capsid. Whole cells vaccines which employ cells expressing heterologous proteins are known in the art. See, e.g., Robinson, K. et al. (1997) Nature Biotech. 15:653-657; Sirard, J. et al. (1997) Infect. Immun. 65:2029-2033; Chabalgoity, J. et al. (1997) Infect. Immun. 65:2402-2412. These cells may be administered live or may be killed prior to administration. Chabalgoity, J. et al., supra, for example, report the successful use in mice of a live attenuated Salmonella vaccine strain which expresses a portion of a platyhelminth fatty acid-binding protein as a fusion protein on its cells surface.

[0181] A multi-component vaccine can also be prepared using techniques known in the art by combining one or more E. faecalis polypeptides of the present invention, or fragments thereof, with additional non-Enterococcal components (e.g., diphtheria toxin or tetanus toxin, and/or other compounds known to elicit an immune response). Such vaccines are useful for eliciting protective immune responses to both members of the Enterococcus genus and non-Enterococcal pathogenic agents.

[0182] The-vaccines of the present invention also include DNA vaccines. DNA vaccines are currently being developed for a number of infectious diseases. See, et al., Boyer, et al. (1997) Nat. Med. 3:526-532; reviewed in Spier, R. (1996) Vaccine 14:1285-1288. Such DNA vaccines contain a nucleotide sequence encoding one or more E. faecalis polypeptides of the present invention oriented in a manner that allows for expression of the subject polypeptide. For example, the direct administration of plasmid DNA encoding B. burgdorgeri OspA has been shown to elicit protective immunity in mice against borrelial challenge. See, Luke et al. (1997) J. Infect. Dis. 175:91-97.

[0183] The present invention also relates to the administration of a vaccine which is co-administered with a molecule capable of modulating immune responses. Kim et al. (1997) Nature Biotech. 15:641-646, for example, report the enhancement of immune responses produced by DNA immunizations when DNA sequences encoding molecules which stimulate the immune response are co-administered. In a similar fashion, the vaccines of the present invention may be co-administered with either nucleic acids encoding immune modulators or the immune modulators themselves. These immune modulators include granulocyte macrophage colony stimulating factor (GM-CSF) and CD86.

[0184] The vaccines of the present invention may be used to confer resistance to Enterococcal infection by either passive or active immunization. When the vaccines of the present invention are used to confer resistance to Enterococcal infection through active immunization, a vaccine of the present invention is administered to an animal to elicit a protective immune response which either prevents or attenuates a Enterococcal infection. When the vaccines of the present invention are used to confer resistance to Enterococcal infection through passive immunization, the vaccine is provided to a host animal (e.g., human, dog, or mouse), and the antisera elicited by this antisera is recovered and directly provided to a recipient suspected of having an infection caused by a member of the Enterococcus genus.

[0185] The ability to label antibodies, or fragments of antibodies, with toxin molecules provides an additional method for treating Enterococcal infections when passive immunization is conducted. In this embodiment, antibodies, or fragments of antibodies, capable of recognizing the E. faecalis polypeptides disclosed herein, or fragments thereof, as well as other Enterococcus proteins, are labeled with toxin molecules prior to their administration to the patient. When such toxin derivatized antibodies bind to Enterococcus cells, toxin moieties will be localized to these cells and will cause their death.

[0186] The present invention thus concerns and provides a means for preventing or attenuating a Enterococcal infection resulting from organisms which have antigens that are recognized and bound by antisera produced in response to the polypeptides of the present invention. As used herein, a vaccine is said to prevent or attenuate a disease if its administration to an animal results either in the total or partial attenuation (i.e., suppression) of a symptom or condition of the disease, or in the total or partial immunity of the animal to the disease.

[0187] The administration of the vaccine (or the antisera which it elicits) may be for either a “prophylactic” or “therapeutic” purpose. When provided prophylactically, the compound(s) are provided in advance of any symptoms of Enterococcal infection. The prophylactic administration of the compound(s) serves to prevent or attenuate any subsequent infection. When provided therapeutically, the compound(s) is provided upon or after the detection of symptoms which indicate that an animal may be infected with a member of the Enterococcus genus. The therapeutic administration of the compound(s) serves to attenuate any actual infection. Thus, the E. faecalis polypeptides, and fragments thereof, of the present invention may be provided either prior to the onset of infection (so as to prevent or attenuate an anticipated infection) or after the initiation of an actual infection.

[0188] The polypeptides of the invention, whether encoding a portion of a native protein or a functional derivative thereof, may be administered in pure form or may be coupled to a macromolecular carrier. Example of such carriers are proteins and carbohydrates. Suitable proteins which may act as macromolecular carrier for enhancing the immunogenicity of the polypeptides of the present invention include keyhole limpet hemacyanin (KLH) tetanus toxoid, pertussis toxin, bovine serum albumin, and ovalbumin. Methods for coupling the polypeptides of the present invention to such macromolecular carriers are disclosed in Harlow et al., ANTIBODIES: A LABORATORY MANUAL, (Cold Spring Harbor Laboratory Press, 2nd ed. 1988).

[0189] A composition is said to be “pharmacologically or physiologically acceptable” if its administration can be tolerated by a recipient animal and is otherwise suitable for administration to that animal. Such an agent is said to be administered in a “therapeutically effective amount” if the amount administered is physiologically significant. An agent is physiologically significant if its presence results in a detectable change in the physiology of a recipient patient.

[0190] While in all instances the vaccine of the present invention is administered as a pharmacologically acceptable compound, one skilled in the art would recognize that the composition of a pharmacologically acceptable compound varies with the animal to which it is administered. For example, a vaccine intended for human use will generally not be co-administered with Freund's adjuvant. Further, the level of purity of the E. faecalis polypeptides of the present invention will normally be higher when administered to a human than when administered to a non-human animal.

[0191] As would be understood by one of ordinary skill in the art, when the vaccine of the present invention is provided to an animal, it may be in a composition which may contain salts, buffers, adjuvants, or other substances which are desirable for improving the efficacy of the composition. Adjuvants are substances that can be used to specifically augment a specific immune response. These substances generally perform two functions: (1) they protect the antigen(s) from being rapidly catabolized after administration and (2) they nonspecifically stimulate immune responses.

[0192] Normally, the adjuvant and the composition are mixed prior to presentation to the immune system, or presented separately, but into the same site of the animal being immunized. Adjuvants can be loosely divided into several groups based upon their composition. These groups include oil adjuvants (for example, Freund's complete and incomplete), mineral salts (for example, AlK(SO₄)₂, AlNa(SO₄)₂, AlNH₄(SO₄), silica, kaolin, and carbon), polynucleotides (for example, poly IC and poly AU acids), and certain natural substances (for example, wax D from Mycobacterium tuberculosis, as well as substances found in Corynebacterium parvum, or Bordetella pertussis, and members of the genus Brucella. Other substances useful as adjuvants are the saponins such as, for example, Quil A. (Superfos A/S, Denmark). Preferred adjuvants for use in the present invention include aluminum salts, such as AlK(SO₄)₂, AlNa(SO₄)₂, and AlNH₄(SO₄). Examples of materials suitable for use in vaccine compositions are provided in REMINGTON'S PHARMACEUTICAL SCIENCES 1324-1341 (A. Osol, ed, Mack Publishing Co, Easton, Pa., (1980) (incorporated herein by reference).

[0193] The therapeutic compositions of the present invention can be administered parenterally by injection, rapid infusion, nasopharyngeal absorption (intranasopharangeally), dermoabsorption, or orally. The compositions may alternatively be administered intramuscularly, or intravenously. Compositions for parenteral administration include sterile aqueous or non-aqueous solutions, suspensions, and emulsions. Examples of non-aqueous solvents are propylene glycol, polyethylene glycol, vegetable oils such as olive oil, and injectable organic esters such as ethyl oleate. Carriers or occlusive dressings can be used to increase skin permeability and enhance antigen absorption. Liquid dosage forms for oral administration may generally comprise a liposome solution containing the liquid dosage form. Suitable forms for suspending liposomes include emulsions, suspensions, solutions, syrups, and elixirs containing inert diluents commonly used in the art, such as purified water. Besides the inert diluents, such compositions can also include adjuvants, wetting agents, emulsifying and suspending agents, or sweetening, flavoring, or perfuming agents.

[0194] Therapeutic compositions of the present invention can also be administered in encapsulated form. For example, intranasal immunization using vaccines encapsulated in biodegradable microsphere composed of poly(DL-lactide-co-glycolide). See, Shahin, R. et al. (1995) Infect. Immun. 63:1195-1200. Similarly, orally administered encapsulated Salmonella typhimurium antigens can also be used. Allaoui-Attarki, K. et al. (1997) Infect. Immun. 65:853-857. Encapsulated vaccines of the present invention can be administered by a variety of routes including those involving contacting the vaccine with mucous membranes (e.g., intranasally, intracolonicly, intraduodenally).

[0195] Many different techniques exist for the timing of the immunizations when a multiple administration regimen is utilized. It is possible to use the compositions of the invention more than once to increase the levels and diversities of expression of the immunoglobulin repertoire expressed by the immunized animal. Typically, if multiple immunizations are given, they will be given one to two months apart.

[0196] According to the present invention, an “effective amount” of a therapeutic composition is one which is sufficient to achieve a desired biological effect. Generally, the dosage needed to provide an effective amount of the composition will vary depending upon such factors as the animal's or human's age, condition, sex, and extent of disease, if any, and other variables which can be adjusted by one of ordinary skill in the art.

[0197] The antigenic preparations of the invention can be administered by either single or multiple dosages of an effective amount. Effective amounts of the compositions of the invention can vary from 0.01-1,000 μg/ml per dose, more preferably 0.1-500 μg/ml per dose, and most preferably 10-300 μg/ml per dose.

### EXAMPLES

### Example 1

### Isolation of a Selected DNA Clone From the Deposited Sample of E. faecalis

[0198] Three approaches can be used to isolate a E. faecalis clone comprising a polynucleotide of the present invention from any E. faecalis genomic DNA library. The E. faecalis strain V586 has been deposited as a convienent source for obtaining a E. faecalis strain although a wide varity of strains E. faecalis strains can be used which are known in the art.

[0199] E. faecalis genomic DNA is prepared using the following method. A 20 ml overnight bacterial culture grown in a rich medium (e.g., Trypticase Soy Broth, Brain Heart Infusion broth or Super broth), pelleted, washed two times with TES (30 mM Tris-pH 8.0, 25 mM EDTA, 50 mM NaCl), and resuspended in 5 ml high salt TES (2.5M NaCl). Lysostaphin is added to final concentration of approx 50 ug/ml and the mixture is rotated slowly 1 hour at 37C to make protoplast cells. The solution is then placed in incubator (or place in a shaking water bath) and warmed to 55C. Five hundred micro liter of 20% sarcosyl in TES (final concentration 2%) is then added to lyse the cells. Next, guanidine HCl is added to a final concentration of 7M (3.69 g in 5.5 ml). The mixture is swirled slowly at 55C for 60-90 min (solution should clear). A CsCl gradient is then set up in SW41 ultra clear tubes using 2.0 ml 5.7M CsCl and overlaying with 2.85M CsCl. The gradient is carefully overlayed with the DNA-containing GuHCl solution. The gradient is spun at 30,000 rpm, 20C for 24 hr and the lower DNA band is collected. The volume is increased to 5 ml with TE buffer. The DNA is then treated with protease K (10 ug/ml) overnight at 37 C, and precipitated with ethanol. The precipitated DNA is resuspended in a desired buffer.

[0200] In the first method, a plasmid is directly isolated by screening a plasmid E. faecalis genomic DNA library using a polynucleotide probe corresponding to a polynucleotide of the present invention. Particularly, a specific polynucleotide with 30-40 nucleotides is synthesized using an Applied Biosystems DNA synthesizer according to the sequence reported. The oligonucleotide is labeled, for instance, with ³²P-γ-ATP using T4 polynucleotide kinase and purified according to routine methods. (See, e.g., Maniatis et al., Molecular Cloning: A Laboratory Manual, Cold Spring Harbor Press, Cold Spring, N.Y. (1982).) The library is transformed into a suitable host, as indicated above (such as XL-1 Blue (Stratagene)) using techniques known to those of skill in the art. See, e.g., Sambrook et al. MOLECULAR CLONING: A LABORATORY MANUAL (Cold Spring Harbor, N.Y. 2nd ed. 1989); Ausubel et al., CURRENT PROTOCALS IN MOLECULAR BIOLOGY (John Wiley and Sons, N.Y. 1989). The transformants are plated on 1.5% agar plates (containing the appropriate selection agent, e.g., ampicillin) to a density of about 150 transformants (colonies) per plate. These plates are screened using Nylon membranes according to routine methods for bacterial colony screening. See, e.g., Sambrook et al. MOLECULAR CLONING: A LABORATORY MANUAL (Cold Spring Harbor, N.Y. 2nd ed. 1989); Ausubel et al., CURRENT PROTOCALS IN MOLECULAR BIOLOGY (John Wiley and Sons, N.Y. 1989) or other techniques known to those of skill in the art.

[0201] Alternatively, two primers of 15-25 nucleotides derived from the 5′ and 3′ ends of a polynucleotide of Table 1 are synthesized and used to amplify the desired DNA by PCR using a E. faecalis genomic DNA prep as a template. PCR is carried out under routine conditions, for instance, in 25 μl of reaction mixture with 0.5 ug of the above DNA template. A convenient reaction mixture is 1.5-5 mM MgCl₂, 0.01% (w/v) gelatin, 20 μM each of dATP, dCTP, dGTP, dTTP, 25 pmol of each primer and 0.25 Unit of Taq polymerase. Thirty five cycles of PCR (denaturation at 94° C. for 1 min; annealing at 55° C. for 1 min; elongation at 72° C. for 1 min) are performed with a Perkin-Elmer Cetus automated thermal cycler. The amplified product is analyzed by agarose gel electrophoresis and the DNA band with expected molecular weight is excised and purified. The PCR product is verified to be the selected sequence by subcloning and sequencing the DNA product.

[0202] Finally, overlapping oligos of the DNA sequences of Table 1 can be chemically synthesized and used to generate a nucleotide sequence of desired length using PCR methods known in the art.

### Example 2(a):

### Expression and Purification Enterococcal polypeptides in E. coli

[0203] The bacterial expression vector pQE60 was used for bacterial expression of some of the polypeptide fragments used in the soft tissue and systemic infection models discussed below. (QIAGEN, Inc., 9259 Eton Avenue, Chatsworth, Calif., 91311). pQE60 encodes ampicillin antibiotic resistance (“Ampr”) and contains a bacterial origin of replication (“ori”), an IPTG inducible promoter, a ribosome binding site (“RBS”), six codons encoding histidine residues that allow affinity purification using nickel-nitrilo-tri-acetic acid (“Ni-NTA”) affinity resin (QIAGEN, Inc., supra) and suitable single restriction enzyme cleavage sites. These elements are arranged such that an inserted DNA fragment encoding a polypeptide expresses that polypeptide with the six His residues (i.e., a “6× His tag”) covalently linked to the carboxyl terminus of that polypeptide.

[0204] The DNA sequence encoding the desired portion of a E. faecalis protein of the present invention was amplified from E. faecalis genomic DNA using PCR oligonucleotide primers which anneal to the 5′ and 3′ sequences coding for the portions of the E. faecalis polynucleotide shown in Table 1. Additional nucleotides containing restriction sites to facilitate cloning in the pQE60 vector are added to the 5′ and 3′ sequences, respectively.

[0205] For cloning the mature protein, the 5′ primer has a sequence containing an appropriate restriction site followed by nucleotides of the amino terminal coding sequence of the desired E. faecalis polynucleotide sequence in Table 1. One of ordinary skill in the art would appreciate that the point in the protein coding sequence where the 5′ and 3′ primers begin may be varied to amplify a DNA segment encoding any desired portion of the complete protein shorter or longer than the mature form. The 3′ primer has a sequence containing an appropriate restriction site followed by nucleotides complementary to the 3′ end of the polypeptide coding sequence of Table 1, excluding a stop codon, with the coding sequence aligned with the restriction site so as to maintain its reading frame with that of the six His codons in the pQE60 vector.

[0206] The amplified E. faecalis DNA fragment and the vector pQE60 were digested with restriction enzymes which recognize the sites in the primers and the digested DNAs were then ligated together. The E. faecalis DNA was inserted into the restricted pQE60 vector in a manner which places the E. faecalis protein coding region downstream from the IPTG-inducible promoter and in-frame with an initiating AUG and the six histidine codons.

[0207] The ligation mixture was transformed into competent E. coli cells using standard procedures such as those described by Sambrook et al., supra. E. coli strain M15/rep4, containing multiple copies of the plasmid pREP4, which expresses the lac repressor and confers kanamycin resistance (“Kanr”), was used in carrying out the illustrative example described herein. This strain, which was only one of many that are suitable for expressing a E. faecalis polypeptide, is available commercially (QIAGEN, Inc., supra). Transformants were identified by their ability to grow on LB agar plates in the presence of ampicillin and kanamycin. Plasmid DNA was isolated from resistant colonies and the identity of the cloned DNA confirmed by restriction analysis, PCR and DNA sequencing.

[0208] Clones containing the desired constructs were grown overnight (“O/N”) in liquid culture in LB media supplemented with both ampicillin (100 μg/ml) and kanamycin (25 μg/ml). The O/N culture was used to inoculate a large culture, at a dilution of approximately 1:25 to 1:250. The cells were grown to an optical density at 600 nm (“OD600”) of between 0.4 and 0.6. Isopropyl-β-D-thiogalactopyranoside (“IPTG”) was then added to a final concentration of 1 mM to induce transcription from the lac repressor sensitive promoter, by inactivating the lacI repressor. Cells subsequently were incubated further for 3 to 4 hours. Cells then were harvested by centrifugation.

[0209] The cells were then stirred for 3-4 hours at 4° C. in 6M guanidine-HCl, pH 8. The cell debris was removed by centrifugation, and the supernatant containing the E. faecalis polypeptide was loaded onto a nickel-nitrilo-tri-acetic acid (“Ni-NTA”) affinity resin column (QIAGEN, Inc., supra). Proteins with a 6× His tag bind to the Ni-NTA resin with high affinity were purified in a simple one-step procedure (for details see: The QIAexpressionist, 1995, QIAGEN, Inc., supra). Briefly the supernatant was loaded onto the column in 6 M guanidine-HCl, pH 8, the column was first washed with 10 volumes of 6 M guanidine-HCl, pH 8, then washed with 10 volumes of 6 M guanidine-HCl pH 6, and finally the E. faecalis polypeptide was eluted with 6 M guanidine-HCl, pH 5.

[0210] The purified protein was then renatured by dialyzing it against phosphate-buffered saline (PBS) or 50 mM Na-acetate, pH 6 buffer plus 200 mM NaCl. Alternatively, the protein could be successfully refolded while immobilized on the Ni-NTA column. The recommended conditions are as follows: renature using a linear 6M-1M urea gradient in 500 mM NaCl, 20% glycerol, 20 mM Tris/HCl pH 7.4, containing protease inhibitors. The renaturation should be performed over a period of 1.5 hours or more. After renaturation the proteins can be eluted by the addition of 250 mM imidazole. Imidazole was removed by a final dialyzing step against PBS or 50 mM sodium acetate pH 6 buffer plus 200 mM NaCl. The purified protein was stored at 4° C. or frozen at −80° C.

[0211] Some of the polypeptide of the present invention were prepared using a non-denaturing protein purification method. For these polypeptides, the cell pellet from each liter of culture was resuspended in 25 mls of Lysis Buffer A at 4° C. (Lysis Buffer A=50 mM Na-phosphate, 300 mM NaCl, 10 mM 2-mercaptoethanol, 10% Glycerol, pH 7.5 with 1 tablet of Complete EDTA-free protease inhibitor cocktail (Boehringer Mannheim #1873580) per 50 ml of buffer). Absorbance at 550 nm was approximately 10-20 O.D./ml. The suspension was then put through three freeze/thaw cycles from −70° C. (using a ethanol-dry ice bath) up to room temperature. The cells were lysed via sonication in short 10 sec bursts over 3 minutes at approximately 80W while kept on ice. The sonicated sample was then centrifuged at 15,000 RPM for 30 minutes at 4° C. The supernatant was passed through a column containing 1.0 ml of CL-4B resin to pre-clear the sample of any proteins that may bind to agarose non-specifically, and the flow-through fraction was collected.

[0212] The pre-cleared flow-through was applied to a nickel-nitrilo-tri-acetic acid (“Ni-NTA”) affinity resin column (Qiagen, Inc., supra). Proteins with a 6× His tag bind to the Ni-NTA resin with high affinity and can be purified in a simple one-step procedure. Briefly, the supernatant was loaded onto the column in Lysis Buffer A at 4° C., the column was first washed with 10 volumes of Lysis Buffer A until the A280 of the eluate returns to the baseline. Then, the column was washed with 5 volumes of 40 mM Imidazole (92% Lysis Buffer A/8% Buffer B) (Buffer B=50 mM Na-Phosphate, 300 mM NaCl, 10% Glycerol, 10 mM 2-mercaptoethanol, 500 mM Imidazole, pH of the final buffer should be 7.5). The protein was eluted off of the column with a series of increasing Imidazole solutions made by adjusting the ratios of Lysis Buffer A to Buffer B. Three different concentrations were used: 3 volumes of 75 mM Imidazole, 3 volumes of 150 mM Imidazole, 5 volumes of 500 mM Imidazole. The fractions containing the purified protein were analyzed using 8%, 10% or 14% SDS-PAGE depending on the protein size. The purified protein was then dialyzed 2× against phosphate-buffered saline (PBS) in order to place it into an easily workable buffer. The purified protein was stored at 4° C. or frozen at −80°.

[0213] The following alternative method may be used to purify E. faecalis expressed in E coli when it is present in the form of inclusion bodies. Unless otherwise specified, all of the following steps are conducted at 4-10° C.

[0214] Upon completion of the production phase of the E. coli fermentation, the cell culture is cooled to 4-10° C. and the cells are harvested by continuous centrifugation at 15,000 rpm (Heraeus Sepatech). On the basis of the expected yield of protein per unit weight of cell paste and the amount of purified protein required, an appropriate amount of cell paste, by weight, is suspended in a buffer solution containing 100 mM Tris, 50 mM EDTA, pH 7.4. The cells are dispersed to a homogeneous suspension using a high shear mixer.

[0215] The cells are then lysed by passing the solution through a microfluidizer (Microfluidics, Corp. or APV Gaulin, Inc.) twice at 4000-6000 psi. The homogenate is then mixed with NaCl solution to a final concentration of 0.5 M NaCl, followed by centrifugation at 7000× g for 15 min. The resultant pellet is washed again using 0.5M NaCl, 100 mM Tris, 50 mM EDTA, pH 7.4.

[0216] The resulting washed inclusion bodies are solubilized with 1.5 M guanidine hydrochloride (GuHCl) for 2-4 hours. After 7000× g centrifugation for 15 min., the pellet is discarded and the E. faecalis polypeptide-containing supernatant is incubated at 4° C. overnight to allow further GuHCl extraction.

[0217] Following high speed centrifugation (30,000× g) to remove insoluble particles, the GuHCl solubilized protein is refolded by quickly mixing the GuHCl extract with 20 volumes of buffer containing 50 mM sodium, pH 4.5, 150 mM NaCl, 2 mM EDTA by vigorous stirring. The refolded diluted protein solution is kept at 4° C. without mixing for 12 hours prior to further purification steps.

[0218] To clarify the refolded E. faecalis polypeptide solution, a previously prepared tangential filtration unit equipped with 0.16 μm membrane filter with appropriate surface area (e.g., Filtron), equilibrated with 40 mM sodium acetate, pH 6.0 is employed. The filtered sample is loaded onto a cation exchange resin (e.g., Poros HS-50, Perseptive Biosystems). The column is washed with 40 mM sodium acetate, pH 6.0 and eluted with 250 mM, 500 mM, 1000 mM, and 1500 mM NaCl in the same buffer, in a stepwise manner. The absorbance at 280 mm of the effluent is continuously monitored. Fractions are collected and further analyzed by SDS-PAGE.

[0219] Fractions containing the E. faecalis polypeptide are then pooled and mixed with 4 volumes of water. The diluted sample is then loaded onto a previously prepared set of tandem columns of strong anion (Poros HQ-50, Perseptive Biosystems) and weak anion (Poros CM-20, Perseptive Biosystems) exchange resins. The columns are equilibrated with 40 mM sodium acetate, pH 6.0. Both columns are washed with 40 mM sodium acetate, pH 6.0, 200 mM NaCl. The CM-20 column is then eluted using a 10 column volume linear gradient ranging from 0.2 M NaCl, 50 mM sodium acetate, pH 6.0 to 1.0 M NaCl, 50 mM sodium acetate, pH 6.5. Fractions are collected under constant A₂₈₀ monitoring of the effluent. Fractions containing the E. faecalis polypeptide (determined, for instance, by 16% SDS-PAGE) are then pooled.

[0220] The resultant E. faecalis polypeptide exhibits greater than 95% purity after the above refolding and purification steps. No major contaminant bands are observed from Commassie blue stained 16% SDS-PAGE gel when 5 μg of purified protein is loaded. The purified protein is also tested for endotoxin/LPS contamination, and typically the LPS content is less than 0.1 ng/ml according to LAL assays.

### Example 2(b)

### Alternative Expression and Purification Enterococcal polypeptides in E. coli

[0221] The vector pQE10 was alternatively used to clone and express some of the polypeptides of the present invention for use in the soft tissue and systemic infection models discussed below. The difference being such that an inserted DNA fragment encoding a polypeptide expresses that polypeptide with the six His residues (i.e., a “6× His tag”) covalently linked to the amino terminus of that polypeptide. The bacterial expression vector pQE10 (QIAGEN, Inc., 9259 Eton Avenue, Chatsworth, Calif., 91311) was used in this example. The components of the pQE10 plasmid are arranged such that the inserted DNA sequence encoding a polypeptide of the present invention expresses the polypeptide with the six His residues (i.e., a “6× His tag”)) covalently linked to the amino terminus.

[0222] The DNA sequences encoding the desired portions of a polypeptide of Table 1 were amplified using PCR oligonucleotide primers from genomic E. faecalis DNA. The PCR primers anneal to the nucleotide sequences encoding the desired amino acid sequence of a polypeptide of the present invention. Additional nucleotides containing restriction sites to facilitate cloning in the pQE10 vector were added to the 5′ and 3′ primer sequences, respectively.

[0223] For cloning a polypeptide of the present invention, the 5′ and 3′ primers were selected to amplify their respective nucleotide coding sequences. One of ordinary skill in the art would appreciate that the point in the protein coding sequence where the 5′ and 3′ primers begins may be varied to amplify a DNA segment encoding any desired portion of a polypeptide of the present invention. The 5′ primer was designed so the coding sequence of the 6× His tag is aligned with the restriction site so as to maintain its reading frame with that of E. faecalis polypeptide. The 3′ was designed to include an stop codon. The amplified DNA fragment was then cloned, and the protein expressed, as described above for the pQE60 plasmid.

[0224] The DNA sequences encoding the amino acid sequences of Table 1 may also be cloned and expressed as fusion proteins by a protocol similar to that described directly above, wherein the pET-32b(+) vector (Novagen, 601 Science Drive, Madison, Wis. 53711) is preferentially used in place of pQE10.

[0225] The above methods are not limited to the polypeptide fragments actually produced. The above method, like the methods below, can be used to produce either fill length polypeptides or desired fragments thereof.

### Example 2(c)

### Alternative Expression and Purification of Enterococcal polypeptides in E. coli

[0226] The bacterial expression vector pQE60 is used for bacterial expression in this example (QIAGEN, Inc., 9259 Eton Avenue, Chatsworth, Calif., 91311). However, in this example, the polypeptide coding sequence is inserted such that translation of the six His codons is prevented and, therefore, the polypeptide is produced with no 6× His tag.

[0227] The DNA sequence encoding the desired portion of the E. faecalis amino acid sequence is amplified from an E. faecalis genomic DNA prep the deposited DNA clones using PCR oligonucleotide primers which anneal to the 5′ and 3′ nucleotide sequences corresponding to the desired portion of the E. faecalis polypeptides. Additional nucleotides containing restriction sites to facilitate cloning in the pQE60 vector are added to the 5′ and 3′ primer sequences.

[0228] For cloning a E. faecalis polypeptides of the present invention, 5′ and 3′ primers are selected to amplify their respective nucleotide coding sequences. One of ordinary skill in the art would appreciate that the point in the protein coding sequence where the 5′ and 3′ primers begin may be varied to amplify a DNA segment encoding any desired portion of a polypeptide of the present invention. The 3′ and 5′ primers contain appropriate restriction sites followed by nucleotides complementary to the 5′ and 3′ ends of the coding sequence respectively. The 3′ primer is additionally designed to include an in-frame stop codon.

[0229] The amplified E. faecalis DNA fragments and the vector pQE60 are digested with restriction enzymes recognizing the sites in the primers and the digested DNAs are then ligated together. Insertion of the E. faecalis DNA into the restricted pQE60 vector places the E. faecalis protein coding region including its associated stop codon downstream from the IPTG-inducible promoter and in-frame with an initiating AUG. The associated stop codon prevents translation of the six histidine codons downstream of the insertion point.

[0230] The ligation mixture is transformed into competent E. coli cells using standard procedures such as those described by Sambrook et al. E. coli strain M15/rep4, containing multiple copies of the plasmid pREP4, which expresses the lac repressor and confers kanamycin resistance (“Kanr”), is used in carrying out the illustrative example described herein. This strain, which is only one of many that are suitable for expressing E. faecalis polypeptide, is available commercially (QIAGEN, Inc., supra). Transformants are identified by their ability to grow on LB plates in the presence of ampicillin and kanamycin. Plasmid DNA is isolated from resistant colonies and the identity of the cloned DNA confirmed by restriction analysis, PCR and DNA sequencing.

[0231] Clones containing the desired constructs are grown overnight (“O/N”) in liquid culture in LB media supplemented with both ampicillin (100 μg/ml) and kanamycin (25 μg/ml). The O/N culture is used to inoculate a large culture, at a dilution of approximately 1:25 to 1:250. The cells are grown to an optical density at 600 nm (“OD600”) of between 0.4 and 0.6. isopropyl-b-D-thiogalactopyranoside (“IPTG”) is then added to a final concentration of 1 mM to induce transcription from the lac repressor sensitive promoter, by inactivating the lacI repressor. Cells subsequently are incubated further for 3 to 4 hours. Cells then are harvested by centrifugation.

[0232] To purify the E. faecalis polypeptide, the cells are then stirred for 3-4 hours at 4° C. in 6M guanidine-HCl, pH 8. The cell debris is removed by centrifugation, and the supernatant containing the E. faecalis polypeptide is dialyzed against 50 mM Na-acetate buffer pH 6, supplemented with 200 mM NaCl. Alternatively, the protein can be successfully refolded by dialyzing it against 500 mM NaCl, 20% glycerol, 25 mM Tris/HCl pH 7.4, containing protease inhibitors. After renaturation the protein can be purified by ion exchange, hydrophobic interaction and size exclusion chromatography. Alternatively, an affinity chromatography step such as an antibody column can be used to obtain pure E. faecalis polypeptide. The purified protein is stored at 4° C. or frozen at −80° C.

[0233] The following alternative method may be used to purify E. faecalis polypeptides expressed in E coli when it is present in the form of inclusion bodies. Unless otherwise specified, all of the following steps are conducted at 4-10° C.

[0234] Upon completion of the production phase of the E. coli fermentation, the cell culture is cooled to 4-10° C. and the cells are harvested by continuous centrifugation at 15,000 rpm (Heraeus Sepatech). On the basis of the expected yield of protein per unit weight of cell paste and the amount of purified protein required, an appropriate amount of cell paste, by weight, is suspended in a buffer solution containing 100 mM Tris, 50 mM EDTA, pH 7.4. The cells are dispersed to a homogeneous suspension using a high shear mixer.

[0235] The cells were then lysed by passing the solution through a microfluidizer (Microfluidics, Corp. or APV Gaulin, Inc.) twice at 4000-6000 psi. The homogenate is then mixed with NaCl solution to a final concentration of 0.5 M NaCl, followed by centrifugation at 7000× g for 15 min. The resultant pellet is washed again using 0.5M NaCl, 100 mM Tris, 50 mM EDTA, pH 7.4.

[0236] The resulting washed inclusion bodies are solubilized with 1.5 M guanidine hydrochloride (GuHCl) for 2-4 hours. After 7000× g centrifugation for 15 min., the pellet is discarded and the E. faecalis polypeptide-containing supernatant is incubated at 4° C. overnight to allow further GuHCl extraction.

[0237] Following high speed centrifugation (30,000× g) to remove insoluble particles, the GuHCl solubilized protein is refolded by quickly mixing the GuHCl extract with 20 volumes of buffer containing 50 mM sodium, pH 4.5, 150 mM NaCl, 2 mM EDTA by vigorous stirring. The refolded diluted protein solution is kept at 4° C. without mixing for 12 hours prior to further purification steps.

[0238] To clarify the refolded E. faecalis polypeptide solution, a previously prepared tangential filtration unit equipped with 0.16 μm membrane filter with appropriate surface area (e.g., Filtron), equilibrated with 40 mM sodium acetate, pH 6.0 is employed. The filtered sample is loaded onto a cation exchange resin (e.g., Poros HS-50, Perseptive Biosystems). The column is washed with 40 mM sodium acetate, pH 6.0 and eluted with 250 mM, 500 mM, 1000 mM, and 1500 mM NaCl in the same buffer, in a stepwise manner. The absorbance at 280 mm of the effluent is continuously monitored. Fractions are collected and further analyzed by SDS-PAGE.

[0239] Fractions containing the E. faecalis polypeptide are then pooled and mixed with 4 volumes of water. The diluted sample is then loaded onto a previously prepared set of tandem columns of strong anion (Poros HQ-50, Perseptive Biosystems) and weak anion (Poros CM-20, Perseptive Biosystems) exchange resins. The columns are equilibrated with 40 mM sodium acetate, pH 6.0. Both columns are washed with 40 mM sodium acetate, pH 6.0, 200 mM NaCl. The CM-20 column is then eluted using a 10 column volume linear gradient ranging from 0.2 M NaCl, 50 mM sodium acetate, pH 6.0 to 1.0 M NaCl, 50 mM sodium acetate, pH 6.5. Fractions are collected under constant A₂₈₀ monitoring of the effluent. Fractions containing the E. faecalis polypeptide (determined, for instance, by 16% SDS-PAGE) are then pooled.

[0240] The resultant E. faecalis polypeptide exhibits greater than 95% purity after the above refolding and purification steps. No major contaminant bands are observed from Commassie blue stained 16% SDS-PAGE gel when 5 μg of purified protein is loaded. The purified protein is also tested for endotoxin/LPS contamination, and typically the LPS content is less than 0.1 ng/ml according to LAL assays.

### Example 2(d)

### Cloning and Expression of E. faecalis in Other Bacteria

[0241] E. faecalis polypeptides can also be produced in: E. faecalis using the methods of S. Skinner et al., (1988) Mol. Microbiol. 2:289-297 or J. I. Moreno (1996) Protein Expr. Purif. 8(3):332-340; Lactobacillus using the methods of C. Rush et al., 1997 Appl. Microbiol. Biotechnol. 47(5):537-542; or in Bacillus subtilis using the methods Chang et al., U.S. Pat. No. 4,952,508.

### Example 3

### Cloning and Expression in COS Cells

[0242] A E. faecalis expression plasmid is made by cloning a portion of the DNA encoding a E. faecalis polypeptide into the expression vector pDNAI/Amp or pDNAIII (which can be obtained from Invitrogen, Inc.). The expression vector pDNAI/amp contains: (1) an E. coli origin of replication effective for propagation in E. coli and other prokaryotic cells; (2) an ampicillin resistance gene for selection of plasmid-containing prokaryotic cells; (3) an SV40 origin of replication for propagation in eukaryotic cells; (4) a CMV promoter, a polylinker, an SV40 intron; (5) several codons encoding a hemagglutinin fragment (i.e., an “HA” tag to facilitate purification) followed by a termination codon and polyadenylation signal arranged so that a DNA can be conveniently placed under expression control of the CMV promoter and operably linked to the SV40 intron and the polyadenylation signal by means of restriction sites in the polylinker. The HA tag corresponds to an epitope derived from the influenza hemagglutinin protein described by Wilson et al. 1984 Cell 37:767. The fusion of the HA tag to the target protein allows easy detection and recovery of the recombinant protein with an antibody that recognizes the HA epitope. pDNAIII contains, in addition, the selectable neomycin marker.

[0243] A DNA fragment encoding a E. faecalis polypeptide is cloned into the polylinker region of the vector so that recombinant protein expression is directed by the CMV promoter. The plasmid construction strategy is as follows. The DNA from a E. faecalis genomic DNA prep is amplified using primers that contain convenient restriction sites, much as described above for construction of vectors for expression of E. faecalis in E. coli. The 5′ primer contains a Kozak sequence, an AUG start codon, and nucleotides of the 5′ coding region of the E. faecalis polypeptide. The 3′ primer, contains nucleotides complementary to the 3′ coding sequence of the E. faecalis DNA, a stop codon, and a convenient restriction site.

[0244] The PCR amplified DNA fragment and the vector, pDNAI/Amp, are digested with appropriate restriction enzymes and then ligated. The ligation mixture is transformed into an appropriate E. coli strain such as SURE™ (Stratagene Cloning Systems, La Jolla, Calif. 92037), and the transformed culture is plated on ampicillin media plates which then are incubated to allow growth of ampicillin resistant colonies. Plasmid DNA is isolated from resistant colonies and examined by restriction analysis or other means for the presence of the fragment encoding the E. faecalis polypeptide

[0245] For expression of a recombinant E. faecalis polypeptide, COS cells are transfected with an expression vector, as described above, using DEAE-dextran, as described, for instance, by Sambrook et al. (supra). Cells are incubated under conditions for expression of E. faecalis by the vector.

[0246] Expression of the E. faecalis-HA fusion protein is detected by radiolabeling and immunoprecipitation, using methods described in, for example Harlow et al., supra. To this end, two days after transfection, the cells are labeled by incubation in media containing ³⁵S-cysteine for 8 hours. The cells and the media are collected, and the cells are washed and the lysed with detergent-containing RIPA buffer: 150 mM NaCl, 1% NP-4 0, 0.1% SDS, 1% NP-40, 0.5% DOC, 50 mM TRIS, pH 7.5, as described by Wilson et al. (supra ). Proteins are precipitated from the cell lysate and from the culture media using an HA-specific monoclonal antibody. The precipitated proteins then are analyzed by SDS-PAGE and autoradiography. An expression product of the expected size is seen in the cell lysate, which is not seen in negative controls.

### Example 4

### Cloning and Expression in CHO Cells

[0247] The vector pC4 is used for the expression of E. faecalis polypeptide in this example. Plasmid pC4 is a derivative of the plasmid pSV2-dhfr (ATCC Accession No. 37146). The plasmid contains the mouse DHFR gene under control of the SV40 early promoter. Chinese hamster ovary cells or other cells lacking dihydrofolate activity that are transfected with these plasmids can be selected by growing the cells in a selective medium (alpha minus MEM, Life Technologies) supplemented with the chemotherapeutic agent methotrexate. The amplification of the DHFR genes in cells resistant to methotrexate (MTX) has been well documented. See, e.g., Alt et al., 1978, J. Biol. Chem. 253:1357-1370; Hamlin et al., 1990, Biochem. et Biophys. Acta, 1097:107-143; Page et al., 1991, Biotechnology 9:64-68. Cells grown in increasing concentrations of MTX develop resistance to the drug by overproducing the target enzyme, DHFR, as a result of amplification of the DHFR gene. If a second gene is linked to the DHFR gene, it is usually co-amplified and over-expressed. It is known in the art that this approach may be used to develop cell lines carrying more than 1,000 copies of the amplified gene(s). Subsequently, when the methotrexate is withdrawn, cell lines are obtained which contain the amplified gene integrated into one or more chromosome(s) of the host cell.

[0248] Plasmid pC4 contains the strong promoter of the long terminal repeat (LTR) of the Rouse Sarcoma Virus, for expressing a polypeptide of interest, Cullen, et al. (1985) Mol. Cell. Biol. 5:438-447; plus a fragment isolated from the enhancer of the immediate early gene of human cytomegalovirus (CMV), Boshart, et al., 1985, Cell 41:521-530. Downstream of the promoter are the following single restriction enzyme cleavage sites that allow the integration of the genes: Bam HI, Xba I, and Asp 718. Behind these cloning sites the plasmid contains the 3′ intron and polyadenylation site of the rat preproinsulin gene. Other high efficiency promoters can also be used for the expression, e.g., the human β-actin promoter, the SV40 early or late promoters or the long terminal repeats from other retroviruses, e.g., HIV and HTLVI. Clontech's Tet-Off and Tet-On gene expression systems and similar systems can be used to express the E. faecalis polypeptide in a regulated way in mammalian cells (Gossen et al., 1992, Proc. Natl. Acad. Sci. USA 89:5547-5551. For the polyadenylation of the mRNA other signals, e.g., from the human growth hormone or globin genes can be used as well. Stable cell lines carrying a gene of interest integrated into the chromosomes can also be selected upon co-transfection with a selectable marker such as gpt, G418 or hygromycin. It is advantageous to use more than one selectable marker in the beginning, e.g., G418 plus methotrexate.

[0249] The plasmid pC4 is digested with the restriction enzymes and then dephosphorylated using calf intestinal phosphates by procedures known in the art. The vector is then isolated from a 1% agarose gel. The DNA sequence encoding the E. faecalis polypeptide is amplified using PCR oligonucleotide primers corresponding to the 5′ and 3′ sequences of the desired portion of the gene. A 5′ primer containing a restriction site, a Kozak sequence, an AUG start codon, and nucleotides of the 5′ coding region of the E. faecalis polypeptide is synthesized and used. A 3′ primer, containing a restriction site, stop codon, and nucleotides complementary to the 3′ coding sequence of the E. faecalis polypeptides is synthesized and used. The amplified fragment is digested with the restriction endonucleases and then purified again on a 1% agarose gel. The isolated fragment and the dephosphorylated vector are then ligated with T4 DNA ligase. E. coli HB101 or XL-1 Blue cells are then transformed and bacteria are identified that contain the fragment inserted into plasmid pC4 using, for instance, restriction enzyme analysis.

[0250] Chinese hamster ovary cells lacking an active DHFR gene are used for transfection. Five μg of the expression plasmid pC4 is cotransfected with 0.5 μg of the plasmid pSVneo using a lipid-mediated transfection agent such as Lipofectin™ or LipofectAMINE.™ (LifeTechnologies Gaithersburg, Md.). The plasmid pSV2-neo contains a dominant selectable marker, the neo gene from Tn5 encoding an enzyme that confers resistance to a group of antibiotics including G418. The cells are seeded in alpha minus MEM supplemented with 1 mg/ml G418. After 2 days, the cells are trypsinized and seeded in hybridoma cloning plates (Greiner, Germany) in alpha minus MEM supplemented with 10, 25, or 50 ng/ml of methotrexate plus 1 mg/ml G418. After about 10-14 days single clones are trypsinized and then seeded in 6-well petri dishes or 10 ml flasks using different concentrations of methotrexate (50 nM, 100 nM, 200 nM, 400 nM, 800 nM). Clones growing at the highest concentrations of methotrexate are then transferred to new 6-well plates containing even higher concentrations of methotrexate (1 μM, 2 μM, 5 μM, 10 mM, 20 mM). The same procedure is repeated until clones are obtained which grow at a concentration of 100-200 μM. Expression of the desired gene product is analyzed, for instance, by SDS-PAGE and Western blot or by reversed phase HPLC analysis.

### Example 5

### Quantitative Murine Soft Tissue Infection Model for E. faecalis

[0251] Compositions of the present invention, including polypeptides and peptides, are assayed for their ability to function as vaccines or to enhance/stimulate an immune response to a bacterial species (e.g., E. faecalis) using the following quantitative murine soft tissue infection model. Mice (e.g., NIH Swiss female mice, approximately 7 weeks old) are first treated with a biologically protective effective amount, or immune enhancing/stimulating effective amount of a composition of the present invention using methods known in the art, such as those discussed above. See, e.g., Harlow et al., ANTIBODIES: A LABORATORY MANUAL, (Cold Spring Harbor Laboratory Press, 2nd ed. 1988). An example of an appropriate starting dose is 20 μg per animal.

[0252] The desired bacterial species used to challenge the mice, such as E. faecalis, is grown as an overnight culture. The culture is diluted to a concentration of 5×10⁸ cfu/ml, in an appropriate media, mixed well, serially diluted, and titered. The desired doses are further diluted 1:2 with sterilized Cytodex 3 microcarrier beads preswollen in sterile PBS (3 g/100 ml). Mice are anesthetize briefly until docile, but still mobile and injected with 0.2 ml of the Cytodex 3 bead/bacterial mixture into each animal subcutaneously in the inguinal region. After four days, counting the day of injection as day one, mice are sacrificed and the contents of the abscess is excised and placed in a 15 ml conical tube containing 1.0 ml of sterile PBS. The contents of the abscess is then enzymatically treated and plated as follows.

[0253] The abscess is first disrupted by vortexing with sterilized glass beads placed in the tubes. 3.0 mls of prepared enzyme mixture (1.0 ml Collagenase D (4.0 mg/ml), 1.0 ml Trypsin (6.0 mg/ml) and 8.0 mls PBS) is then added to each tube followed by a 20 min. incubation at 37C. The solution is then centrifuged and the supernatant drawn off. 0.5 ml dH₂O is then added and the tubes are vortexed and then incubated for 10 min. at room temperature. 0.5 ml media is then added and samples are serially diluted and plated onto agar plates, and grown overnight at 37C. Plates with distinct and separate colonies are then counted, compared to positive and negative control samples, and quantified. The method can be used to identify composition and determine appropriate and effective doses for humans and other animals by comparing the effective doses of compositions of the present invention with compositions known in the art to be effective in both mice and humans. Doses for the effective treatment of humans and other animals, using compositions of the present invention, are extrapolated using the data from the above experiments of mice. It is appreciated that further studies in humans and other animals may be needed to determine the most effective doses using methods of clinical practice known in the art.

### Example 6

### Murine Systemic Neutropenic Model for E. faecalis Infection

[0254] Compositions of the present invention, including polypeptides and peptides, are assayed for their ability to function as vaccines or to enhance/stimulate an immune response to a bacterial species (e.g., E. faecalis) using the following qualitative murine systemic neutropenic model. Mice (e.g., NIH Swiss female mice, approximately 7 weeks old) are first treated with a biologically protective effective amount, or immune enhancing/stimulating effective amount of a composition of the present invention using methods known in the art, such as those discussed above. See, e.g., Harlow et al., ANTIBODIES: A LABORATORY MANUAL, (Cold Spring Harbor Laboratory Press, 2nd ed. 1988). An example of an appropriate starting dose is 20 ug per animal.

[0255] Mice are then injected with 250-300 mg/kg cyclophosphamide intraperitonially. Counting the day of C.P. injection as day one, the mice are left untreated for 5 days to begin recovery of PMNL'S.

[0256] The desired bacterial species used to challenge the mice, such as E. faecalis, is grown as an overnight culture. The culture is diluted to a concentration of 5×10⁸ cfu/ml, in an appropriate media, mixed well, serially diluted, and titered. The desired doses are further diluted 1:2 in 4% Brewer's yeast in media.

[0257] Mice are injected with the bacteria/brewer's yeast challenge intraperitonially. The Brewer's yeast solution alone is used as a control. The mice are then monitored twice daily for the first week following challenge, and once a day for the next week to ascertain morbidity and mortality. Mice remaining at the end of the experiment are sacrificed. The method can be used to identify compositions and determine appropriate and effective doses for humans and other animals by comparing the effective doses of compositions of the present invention with compositions known in the art to be effective in both mice and humans. Doses for the effective treatment of humans and other animals, using compositions of the present invention, are extrapolated using the data from the above experiments of mice. It is appreciated that further studies in humans and other animals may be needed to determine the most effective doses using methods of clinical practice known in the art.

[0258] The disclosure of all publications (including patents, patent applications, journal articles, laboratory manuals, books, or other documents) cited herein are hereby incorporated by reference in their entireties.

[0259] The present invention is not to be limited in scope by the specific embodiments described herein, which are intended as single illustrations of individual aspects of the invention. Functionally equivalent methods and components are within the scope of the invention, in addition to those shown and described herein and will become apparent to those skilled in the art from the foregoing description and accompanying drawings. Such modifications are intended to fall within the scope of the appended claims.

TABLE 2
Closest matching sequences between the polypeptides of the present invention and sequences in GenBank and Derwent databases.

| | GenBank | | BLAST | BLAST P- |
|---|---|---|---|---|
| Query | Access. No. | GenBank Gene Description | Score | Value |
| EF002-2 | gi\|2338759 | (AF018073) periplasmic sorbitol-binding protein; SmoE [Rhodobacter | 113 | 3.60E-18 |
| EF003-2 | gi\|1552773 | hypothetical [Escherichia coli] > gnl\|PID\|d1012634 hypothetical 29.4 | 278 | 1.20E-53 |
| EF003-2 | gi\|2196996 | lipoprotein homolog [Treponema pallidum] > gi\|2108234 29K protein | 309 | 3.30E-44 |
| EF003-2 | gi\|146649 | lipoprotein-28 precursor [Escherichia coli] > gi\|290510 | 263 | 9.20E-40 |
| EF003-2 | gi\|148838 | 28 3kDa membrane protein [Haemophilus influenzae] | 197 | 2.10E-39 |
| EF003-2 | gi\|1573614 | 28 kDa membrane protein (hipA) [Haemophilus influenzae] | 197 | 7.80E-39 |
| EF003-2 | gi\|2314748 | (AE000654) outer membrane protein [Helicobacter pylon] | 263 | 4.60E-37 |
| EF003-2 | gi\|349530 | lipoprotein [Pasteurella haemolytica] > gi\|150508 lipoprotein | 189 | 4.10E-29 |
| EF003-2 | gnl\|PID\|e118435 | similar to hypothetical proteins [Bacillus subtilis] | 158 | 2.70E-26 |
| EF003-2 | gi\|349532 | lipoprotein [Pasteurella haemolytica] > pir\|JN0753\|JN0753 outer | 200 | 1.20E-25 |
| EF003-2 | gi\|1336657 | lipoprotein [Bacillus subtilis] | 182 | 2.70E-25 |
| EF003-2 | gnl\|PID\|e233873 | hypothetical protein [Bacillus subtilis] > gnl\|PID\|e1182900 | 186 | 1.30E-23 |
| EF003-2 | gi\|294071 | lipoprotein 3 [Pasteurella haemolytica] | 199 | 6.60E-23 |
| EF003-2 | gi\|349531 | lipoprotein [Pasteurella haemolytica] > pir\|JN0752\|JN0752 outer | 198 | 1.30E-20 |
| EF003-2 | gi\|294070 | lipoprotein 2 [Pasteurella haemolytica] | 198 | 1.80E-20 |
| EF005-2 | gi\|537235 | Kenn Rudd identifies as gpmB [Escherichia coli] > gi\|1790856 | 127 | 6.20E-12 |
| EF006-2 | gi\|1552773 | hypothetical [Escherichia coli] > gnl\|PID\|d1012634 hypothetical 29.4 | 255 | 1.40E-60 |
| EF006-2 | gi\|349532 | lipoprotein [Pasteurella haemolytica] > pir\|JN0753\|JN0753 outer | 221 | 6.40E-49 |
| EF006-2 | gi\|23 14748 | (AE000654) outer membrane protein [Helicobacter pylon] | 283 | 2.70E-48 |
| EF006-2 | gi\|2196996 | lipoprotein homolog [Treponema pallidum] > gi\|2108234 29K protein | 267 | 4.40E-47 |
| EF006-2 | gnl\|PID\|e118435 | similar to hypothetical proteins [Bacillus subtilis] | 359 | 1.80E-44 |
| EF006-2 | gi\|349531 | lipoprotein [Pasteurella haemolytica] > pir\|JN0752\|JN0752 outer | 218 | 3.80E-41 |
| EF006-2 | gi\|294071 | lipoprotein 3 [Pasteurella haemolytica] | 220 | 2.30E-38 |
| EF006-2 | gi\|146649 | lipoprotein-28 precursor [Escherichia coli] > gi\|290510 | 193 | 2.60E-38 |
| EF006-2 | gi\|294070 | lipoprotein 2 [Pasteurella haemolytica] | 218 | 1.20E-36 |
| EF006-2 | gi\|148838 | 28 3kDa membrane protein [Haemophilus influenzae] | 112 | 8.50E-34 |
| EF006-2 | gi\|1573614 | 28 kDa membrane protein (hlpA) [Haemophilus influenzae] | 112 | 1.50E-33 |
| EF006-2 | gi\|349530 | lipoprotein [Pasteurella haemolytica] > gi\|150508 lipoprotein | 114 | 4.30E-29 |
| EF006-2 | gi\|294069 | lipoprotein 1 [Pasteurella haemolytica] | 114 | 1.301E-27 |
| EF006-2 | gi\|1336657 | lipoprotein [Bacillus subtilis] | 202 | 2.10E-26 |
| EF006-2 | gn\|PID\|e118435 | hypothetical protein [Bacillus subtilis] > gnl\|PID\|e1182900 | 200 | 6.50E-25 |
| EF008-2 | gi\|493017 | endocarditis specific antigen [Enterococcus faecalis] | 1590 | 2.70E-211 |
| EF008-2 | gi\|393269 | adhesion protein [Streptococcus pneumoniae] | 986 | 1.80E-129 |
| EF008-2 | gi\|153834 | adhesin specific for salivary pellicle of dental surfaces | 973 | 1.00E-127 |
| EF008-2 | gi\|1575030 | surface adhesin A precursor [Streptococcus pneumoniae] | 934 | 2.90E-126 |
| EF008-2 | gi\|153826 | adhesin B [Streptococcus sanguis] >pir\|A43583\|A43583 adhesin B | 916 | 3.90E-126 |
| EF008-2 | gi\|1184932 | ScbA [Streptococcus crista] | 915 | 3.401E-125 |
| EF008-2 | gil\|117994 | surface antigen A variant precursor [Streptococcus pneumoniae] | 917 | 5.60E-124 |
| EF008-2 | gi\|310633 | adhesin [Streptococcus gordonii] | 891 | 6.00E-122 |
| EF008-2 | gnl\|PID\|e255529 | lipoprotein [Staphylococcus epidermidis] | 476 | 1.20E-99 |
| EF008-2 | gi\|1573330 | adhesin B precursor (fimA) [Haemophilus influenzae] | 380 | 1.60E-68 |
| EF008-2 | gi\|1245464 | YfeA [Yersinia pestis] > gi\|1245464 YfeA [Yersinia pestis] | 355 | 1.20E-64 |
| EF008-2 | gi\|755075 | periplasmic-binding protein [Synechocystis sp.] > gnl\|PlD\|d1018652 Mn | 321 | 1.70E-62 |
| EF008-2 | gi\|1335912 | EwlA [Erysipelothrix rhusiopathiae] | 232 | 4.40E-42 |
| EF008-2 | gnl\|PID\|e118595 | similar to ABC transporter (membrane protein) [Bacillus | 204 | 4.10E-38 |
| EF008-2 | gi\|1777933 | TroA [Treponema pallidum] | 181 | 2.40E-35 |
| EF009-2 | gi\|349531 | lipoprotein [Pasteurella haemolytica] > pir\|JN0752\|JN0752 outer | 391 | 4.00E-64 |
| EF009-2 | gi\|1552773 | hypothetical [Escherichia coli] > gnl\|PID\|d1012634 hypothetical 29.4 | 359 | 1.90E-63 |
| EF009-2 | gi\|294070 | lipoprotein 2 [Pasteurella haemolytica] | 391 | 6.401E-63 |
| EF009-2 | gi\|349532 | lipoprotein [Pasteurella haemolytica] > pir\|JN0753\|JN0753 outer | 386 | 1.10E-61 |
| EF009-2 | gi\|148838 | 28 3kDa membrane protein [Haemophilus influenzae] | 286 | 5.60E-60 |
| EF009-2 | gi\|1573614 | 28 kDa membrane protein (hipA) [Haemophilus influenzae] | 286 | 7.60E-60 |
| EF009-2 | gi\|294069 | lipoprotein 1 [Pasteurella haemolytica] | 122 | 4.70E-59 |
| EF009-2 | gi\|146649 | lipoprotein-28 precursor [Escherichia coli] > gi\|2905 10 | 326 | 2.20E-58 |
| EF009-2 | gi\|349530 | lipoprotein [Pasteurella haemolytica] > gi\|150508 lipoprotein | 239 | 7.80E-57 |
| EF009-2 | gi\|294071 | lipoprotein 3 [Pasteurella haemolytica] | 344 | 4.90E-56 |
| EF009-2 | gi\|2314748 | (AE000654) outer membrane protein [Helicobacter pylon] | 319 | 4.20E-53 |
| EF009-2 | gi\|2196996 | lipoprotein homolog [Treponema pallidum] > gi\|2108234 29K protein | 312 | 2.60E-41 |
| EF009-2 | gi\|1336657 | lipoprotein [Bacillus subtilis] | 234 | 4.00E-32 |
| EF009-2 | gnl\|PID\|e233873 | hypothetical protein [Bacillus subtilis] > gnl\|PID\|e1182900 | 242 | 1.40E-31 |
| EF009-2 | gnl\|PID\|e118435 | similar to hypothetical proteins [Bacillus subtilis] | 102 | 6.80E-22 |
| EF011-2 | gnl\|PID\|d100965 | ferric anguibactin-binding protein precusor FatB of V. | 579 | 3.10E-98 |
| EF011-2 | gnl\|PID\|d100965 | ferric anguibactin-binding protein precusor FatB of V. | 579 | 3.10E-98 |
| EF011-2 | gnl\|PID\|e185374 | ceuE gene product [Campylobacter coli] | 284 | 1.30E-89 |
| EF011-2 | gnl\|PID\|e185374 | ceuE gene product [Campylobacter coli] | 284 | 1.30E-89 |
| EF011-2 | gi\|150756 | 40 kDa protein [Plasmid pJM1] > pir\|A29928\|A29928 membrane-associated | 222 | 2.80E-52 |
| EF011-2 | gi\|150756 | 40 kDa protein [Plasmid pJM1] > pir\|A29928\|A29928 membrane-associated | 222 | 2.80E-52 |
| EF012-2 | gi\|309662 | pheromone binding protein [Plasmid pCF10] > pir\|B53309\|B53309 | 266 | 8.70E-1 16 |
| EF012-2 | gi\|388269 | traC [Plasmid pADi] > pir\|A53310\|A53310 pheromone cAD1 binding | 252 | 1.10E-109 |
| EF012-2 | gnl\|PID\|d101185 | TRAC [Enterococcus faecalis] | 281 | 3.60E-103 |
| EF012-2 | gnl PID d100655 | TraC [Enterococcus faecalis] | 277 | 2.30E-102 |
| EF012-2 | giI3 12940 | threonine kinase [Streptococcus equisimilis] > pir\|S28153\|S28153 | 227 | 1.90E-67 |
| EF012-2 | gi\|48808 | dciAE [Bacillus subtilis] | 228 | 1.70E-46 |
| EF012-2 | pir\|S16651\|S166 | dciAE protein - Bacillus subtilis | 228 | 1.00E-45 |
| EF012-2 | gnl\|PID\|e118149 | (AJ002571) DppE [Bacillus subtilis] > gnl\|PID\|e1183316 | 228 | 3.80E-45 |
| EF012-2 | gi\|40005 | OppA gene product [Bacillus subtilis] | 281 | 3.90E-44 |
| EF012-2 | gi\|143603 | sporulation protein [Bacillus subtilis] > gnl\|PID\|e1183163 | 281 | 7.70E-44 |
| EF012-2 | gnl\|PID\|d101563 | Periplasmic oligopeptide-binding protein precursor. | 152 | 2.20E-43 |
| EF012-2 | gi\|1574679 | oligopeptide binding protein (oppA) [Haemophilus influenzae] | 178 | 2.20E-42 |
| EF012-2 | gi\|47802 | Opp A (AA1-542) [Salmonella typhimurium] > gi\|47808 precursor | 128 | 1.00E-37 |
| EF012-2 | gi\|882550 | ORF f535 [Escherichia coli] > gi\|1789397 (AE000384) f535; This 535 aa | 228 | 5.30E-36 |
| EF014-2 | pir\|D70070\|D700 | transcriptional regulator homolog ywtF - Bacillus subtilis | 101 | 1.40E-27 |
| EF014-2 | gnl\|PID\|e116988 | capsular polysaccharide synthesis protein [Streptococcus | 121 | 9.50E-27 |
| EF014-2 | gi\|2804769 | (AF030373) putative regulatory protein [Streptococcus pneumoniae] | 121 | 9.50E-27 |
| EF014-2 | gnl\|PID\|e289126 | unknown [Streptococcus pneumoniae] | 121 | 1.00E-24 |
| EF014-2 | gi\|2267239 | ORF1 [Staphylococcus epidermidis] | 234 | 1.50E-24 |
| EF014-2 | gi\|485275 | putative regulatory protein [Streptococcus pneumoniae] | 121 | 3.90E-24 |
| EF014-2 | gi\|2804735 | (AF030367) putative regulatory protein [Streptococcus pneumoniae] | 121 | 3.90E-24 |
| EF014-2 | gi\|2804747 | (AF030369) putative regulatory protein [Streptococcus pneumoniae] | 121 | 3.90E-24 |
| EF014-2 | gi\|1762327 | putative transcriptional regulator [Bacillus subtilis] | 185 | 2.80E-22 |
| EF014-2 | gi\|143156 | membrane bound protein [Bacillus subtilis] > gnl\|PID\|e1184471 | 116 | 1.10E-21 |
| EF014-2 | gnl\|PID\|d101895 | membrane bound protein LytR [Synechocystis sp.] | 113 | 6.20E-20 |
| EF014-2 | gi\|1276874 | EpsA [Streptococcus thermophilus] | 103 | 4.00E-17 |
| EF016-2 | gnl\|PiD\|e118566 | similar to amino acid ABC transporter (binding protein) | 194 | 3.70E-35 |
| EF016-2 | gi\|40934 | arginine binding protein [Escherichia coli] > gi\|769794 artJ | 121 | 1.60E-3 1 |
| EF016-2 | gnl\|PID\|d101527 | Arginine-binding periplasmic protein 2 precursor [Escherichia | 121 | 4.80E-31 |
| EF016-2 | gi\|687652 | FLiY [Escherichia coli] > gnl\|PID\|d1016464 FliY protein precursor. | 160 | 5.70E-31 |
| EF016-2 | gi\|2650410 | (AE001090) glutamine ABC transporter, periplasmic glutamine-binding | 122 | 3.30E-29 |
| EF016-2 | gi\|1649035 | high-affinity periplasmic glutamine binding protein [Salmonella | 104 | 1.80E-27 |
| EF016-2 | gi\|1574634 | glutamine-binding periplasmic protein (glnH) [Haemophilus | 174 | 2.50E-27 |
| EF016-2 | gi\|41569 | GlnH precursor (AA -22 to 226) [Escherichia coli] > gnl\|PID\|d1015250 | 106 | 4.70E-27 |
| EF016-2 | gnl\|PID\|d101527 | Arginine-binding periplasmic protein 1 precursor [Escherichia | 109 | 3.70E-26 |
| EF016-2 | gi\|769791 | artl [Escherichia coli] > gi\|769791 artI [Escherichia coli] | 127 | 2.30E-25 |
| EF016-2 | gnl PP d100892 | homologous to Gin-binding periplasmic proteins [Bacillus | 117 | 8.50E-24 |
| EF016-2 | gi\|154125 | J protein [Salmonella typhimurium] > gi\|47718 reading frame hisJ | 118 | 2.10E-23 |
| EF016-2 | gnl\|PID\|d101688 | HISTIDINE-BINDING PERPLASMIC PROTEIN PRECURSOR (HBP). | 117 | 4.50E-23 |
| EF016-2 | gil 166636 | histidine-binding periplasmic protein HisJ [Escherichia coli] | 117 | 6.60E-23 |
| EF017-2 | gi\|388269 | traC [Plasmid pADi] > pir\|A53310\|A53310 pheromone cADi binding | 421 | 4.50E-128 |
| EF017-2 | gnl PID\|d101185 | TRAC [Enterococcus faecalis] | 417 | 5.10E-124 |
| EF017-2 | gnl PID\|d100655 | TraC [Enterococcus faecalis] | 414 | 4.40E-123 |
| EF017-2 | gi\|309662 | pheromone binding protein [Plasmid pCF10] > pir\|B53309\|B53309 | 415 | 2.40E-119 |
| EF017-2 | gi\|40005 | OppA gene product [Bacillus subtilis] | 294 | 6.20E-82 |
| EF017-2 | gi\|143603 | sporulation protein [Bacillus subtilis] > gnl\|PID\|e1183163 | 290 | 2.80E-79 |
| EF017-2 | gi\|312940 | threonine kinase [Streptococcus equisimilis] > pir\|S28153\|S28153 | 241 | 2.40E-71 |
| EF017-2 | gi\|48808 | dciAE [Bacillus subtilis] | 270 | 1.10E-61 |
| EF017-2 | gnl\|PID\|e118149 | (AJ002571) DppE [Bacillus subtilis] > gnl\|PID\|e1183316 | 270 | 1.50E-61 |
| EF017-2 | pir\|S16651\|S166 | dciAE protein - Bacillus subtilis | 270 | 3.10E-60 |
| EF017-2 | gi\|304925 | periplasmic oligopeptide binding protein [Escherichia coli] | 171 | 2.60E-57 |
| EF017-2 | gi\|147014 | oligopeptide binding protein precursor [Escherichia coli] | 171 | 8.70E-56 |
| EF017-2 | gi\|47802 | Opp A (AA1-542) [Salmonella typhimurium] > gi\|47808 precursor | 154 | 1.30E-52 |
| EF017-2 | gi\|882550 | ORF f535 [Escherichia coli] > gi\|1789397 (AE000384) f535; This 535 aa | 135 | 5.50E-52 |
| EF017-2 | gi\|1574679 | oligopeptide binding protein (oppA) [Haemophilus influenzae] | 168 | 2.90E-43 |
| EF019-2 | gi\|438458 | likely N-terminal signal sequence; mature protein probably | 104 | 2.30E-17 |
| EF021-2 | gnl\|PID\|e311492 | unknown [Bacillus subtilis] > gnl\|PID\|e1184232 similar to ABC | 317 | 2.50E-103 |
| EF021-2 | bbs\|173803 | CD4+ T cell-stimulating antigen [Listeriamonocytogenes, 85E0-1167, | 476 | 2.80E-81 |
| EF021-2 | gi\|581809 | tmbC gene product [Treponema pallidum] > pir\|A43595\|A43595 membrane | 152 | 3.20E-71 |
| EF021-2 | gi\|2688280 | (AB001143) basic membrane protein C (bmpC) [Borrelia burgdorferi] | 101 | 5.501E-27 |
| EF021-2 | gnl\|PID\|e117283 | membrane protein A [Borrelia garinii] | 142 | 6.50E-22 |
| EF021-2 | gnl\|PID\|e117283 | membrane protein A [Borrelia burgdorferi] | 141 | 9.20E-22 |
| EF021-2 | gnl\|PID\|e117283 | membrane protein A [Borrelia burgdorferi] > gi\|516592 membrane | 141 | 9.20E-22 |
| EF021-2 | gnl\|PID\|e117283 | bmpA(p39,ORF1) [Borrelia burgdorferi] | 141 | 1.70E-21 |
| EF021-2 | gi\|508421 | antigen P39 [Borrelia burgdorferi] > gi\|2688281 (AE001143) basic | 141 | 1.70E-21 |
| EF021-2 | gi\|753225 | BmpA protein [Borrelia burgdorferi] | 141 | 2.70E-20 |
| EF021-2 | gnl\|PID\|e117282 | membrane protein A [Borrelia afzelii] | 141 | 8.60E-20 |
| EF021-2 | gnl PP e117283 | membrane protein A [Borrelia afzelii] | 141 | 8.60E-20 |
| EF021-2 | gnl\|PID\|e117283 | membrane protein A [Borrelia afzelii] | 141 | 8.60E-20 |
| EF021-2 | gnl\|PID\|e117282 | bmpA(p39, ORF1) [Borrelia burgdorferi] | 141 | 1.50E-19 |
| EF022-2 | gi\|312940 | threonine kinase [Streptococcus equisimilis] > pir\|S28153\|S28153 | 324 | 5.90E-66 |
| EF022-2 | gi\|309662 | theromone binding protein [Plasmid pCF10] > pir\|B53309\|B53309 | 3007 | 5.60E-60 |
| EF022-2 | gnl\|PID\|d101185 | TRAC [Enterococcus faecalis] | 301 | 4.80E-59 |
| EF022-2 | gnl\|PID\|e118149 | (AJ002571) DppE [Bacillus subtilis] > gnl\|PID\|e1183316 | 170 | 5.10E-59 |
| EF022-2 | gi\|48808 | dciAE [Bacillus subtilis] | 170 | 5.20E-59 |
| EF022-2 | gnl\|PID\|d100655 | TraC [Enterococcus faecalis] | 299 | 2.80E-58 |
| EF022-2 | pir\|S16651\|S166 | dciAE protein - Bacillus subtilis | 170 | 1.60E-57 |
| EF022-2 | gi\|388269 | traC [Plasmid pADi] > pir\|1A533101A53310 pheromone cADi binding | 280 | 2.70E-53 |
| EF022-2 | gi~40005 | OppA gene product [Bacillus subtilis] | 154 | 7.30E-48 |
| EF022-2 | gi\|143603 | sporulation protein [Bacillus subtilis] > gnl\|PID\|e1183163 | 154 | 3.10E-47 |
| EF022-2 | gi\|2688227 | (AE001139) oligopeptide ABC transporter, periplasmic | 215 | 1.00E-36 |
| EF022-2 | gi\|2281458 | (AF000366) oligopeptide permease homolog All [Borrelia burgdorferi] | 215 | 1.00E-36 |
| EF022-2 | gi\|304925 | periplasmic oligopeptide binding protein [Escherichia coli] | 131 | 1.30E-35 |
| EF022-2 | gi\|147014 | oligopeptide binding protein precursor [Escherichia coli] | 131 | 1.80E-34 |
| EF022-2 | gi\|47802 | Opp A (AA1-542) [Salmonella typhimurium] > gi\|47808 precursor | 138 | 4.90E-34 |
| EF023-2 | gi\|309662 | pheromone binding protein [Plasmid pCF10] > pir\|B53309\|B53309 | 231 | 4.70E-66 |
| EF023-2 | gi\|388269 | traC [Plasmid pADi] > pir\|A53310\|A53310 pheromone cAD1 binding | 223 | 4.80E-62 |
| EF023-2 | gnl\|PID\|d101185 | TRAC [Enterococcus faecalis] | 226 | 1.00E-58 |
| EF023-2 | gnl\|PID\|d100655 | TraC [Enterococcus faecalis] | 226 | 4.40E-58 |
| EF023-2 | gi\|48808 | dciAiE [Bacillus subtilis] | 157 | 1.20E-57 |
| EF023-2 | gnl\|PID\|e118149 | (AJ002571) DppE [Bacillus subtilis] > gnl\|PID\|e1183316 | 157 | 120E-57 |
| EF023-2 | pir\|S16651\|S166 | dciAE protein - [Bacillus subtilis] | 157 | 3.80E-56 |
| EF023-2 | gi\|40005 | OppA gene product [Bacillus subtilis] | 137 | 2.30E-53 |
| EF023-2 | gi\|143603 | sporulation protein [Bacillus subtilis] > gnl\|PID\|e1183163 | 133 | 6.90E-53 |
| EF023-2 | gi\|47802 | Opp A (AA1-542) [Salmonella typhimurium] > gi\|47808 precursor | 135 | 2.00E-41 |
| EF023-2 | gi\|2688227 | (AB001139) oligopeptide ABC transporter, periplasmic | 187 | 9.40E-41 |
| EF023-2 | gi\|2281458 | (AF000366) oligopeptide permease homolog All [Borrelia burgdorferi] | 187 | 1.90E-40 |
| EF023-2 | gi\|882550 | ORF_f535 [Escherichia coli] > gi\|789397 (AE000384) f535; This 535 aa | 155 | 1.30E-38 |
| EF023-2 | gi\|304925 | periplasmic oligopeptide binding protein [Escherichia coli] | 130 | 9.00E-37 |
| EF023-2 | gi\|147014 | oligopeptide binding protein precursor [Escherichia coli] | 130 | 3.70E-34 |
| EF026-2 | gi\|2352482 | (AF005097) unknown [Lactococcus lactis] | 141 | 1.10E-23 |
| EF027-2 | gi\|309662 | pheromone binding protein [Plasmid pCF 10] > pir\|B53309\|B53309 | 198 | 6.20E-71 |
| EF027-2 | gnl\|PID\|d100655 | TraC [Enterococcus faecalis] | 202 | 1.50E-68 |
| EF027-2 | gnl\|PID\|d101185 | TRAC [Enterococcus faecalis] | 202 | 1.50E-68 |
| EF027-2 | gi\|388269 | traC [Plasmid pADi] > pir\|A53310\|A53310 pheromone cAD1 binding | 213 | 8.30E-68 |
| EF027-2 | gnl\|PID\|e118149 | (AJ002571) DppE [Bacillus subtilis] > gnl\|PID\|e1183316 | 222 | 3.70E-41 |
| EF027-2 | gi\|48808 | dciAE [Bacillus subtilis] | 222 | 4.90E-41 |
| EF027-2 | pir\|S16651\|S166 | dciAiE protein - Bacillus subtilis | 222 | 1.10E-39 |
| EF027-2 | gi\|40005 | OppA gene product [Bacillus subtilis] | 251 | 4.10E-39 |
| EF027-2 | gi\|143603 | sporulation protein [Bacillus subtilis] > gnl\|PID\|e1183163 | 247 | 5.80E-39 |
| EF027-2 | gi\|312940 | threonine kinase [Streptococcus equisimilis] > pir\|S28153\|S28153 | 233 | 8.90B-33 |
| EF027-2 | gi\|2688227 | (AH001139) oligopeptide ABC transporter, periplasmic | 131 | 2.40E-24 |
| EF027-2 | gi\|228 1458 | (AF000366) oligopeptide permease homolog All [Borrelia burgdorferi] | 131 | 2.40E-24 |
| EF027-2 | gi\|2281468 | (AF000948) OppATV [Borrelia burgdorferi] > gi\|2689891 (AB000792) | 117 | 3.00E-20 |
| EF027-2 | gi\|1574679 | oligopeptide binding protein (oppA) [Haemophilus influenzae] | 130 | 3.50E-20 |
| EF028-2 | gnl\|PID\|d102047 | B.subtilis alkaline phosphatase lilA; P19405 secretory | 996 | 3.60E-131 |
| EF028-2 | pir\|B39096\|B390 | alkaline phosphatase (EC 3.1.3.1) III precursor - Bacillus | 982 | 2.90E-129 |
| EF028-2 | gi\|470383 | alkaline phosphatase A [Bacillus subtilis] > gnl\|PID\|e1182942 | 803 | 4.80E-1 19 |
| EF028-2 | gi\|143324 | APase I [Bacillus licheniformis] > pir\|A44828\|A44828 alkaline | 184 | 3.00E-54 |
| EF028-2 | gi\|147243 | alkaline phosphatase precursor (BC 3.1.3.1) [Escherichia coli] | 183 | 8.30E-54 |
| EF028-2 | gi\|147237 | alkaline phosphatase precursor (BC 3.1.3.1) [Escherichia coli] | 178 | 4.40E-53 |
| EF028-2 | gi\|147239 | alkaline phosphatase precursor (BC 3.1.3.1) [Escherichia coli] | 178 | 4.40E-53 |
| EF028-2 | gi\|147241 | alkaline phosphatase precursor (BC 3.1.3.1) [Escherichia coli] | 178 | 4.40E-53 |
| EF028-2 | gi\|1277127 | phoA gene product [Cloning vector pFWphoAl] > gi\|1277130 phoA gene | 174 | 4.90E-53 |
| EF028-2 | gi\|147229 | alkaline phosphatase precursor (BC 3.1.3.1) [Bscherichia coli] | 178 | 8.40B-53 |
| EF028-2 | gi\|818851 | alkaline phosphatase [synthetic construct] | 174 | 1.10E-52 |
| EF028-2 | gi\|147245 | alkaline phosphatase (phoA) (EC 3.1.3.1) [Escherichia fergusonii] | 177 | 1.20E-52 |
| EF028-2 | gi\|147231 | alkaline phosphatase precursor (EC 3.1.3.1) [Escherichia coli] | 174 | 1.60E-52 |
| EF028-2 | gi\|147235 | alkaline phosphatase precursor (EC 3.1.3.1) [Escherichia coli] | 174 | 1.60E-52 |
| EF028-2 | gi\|1016010 | alkaline phosphatase with N-terminal PeiB-leader and C-terminal | 174 | 1.60E-52 |
| EF029-2 | gi\|1750126 | YncB [Bacillus subtilis] > gnl\|PID\|e1183421 similar to micrococcal | 257 | 3.50E-55 |
| EF029-2 | gnl\|PID\|e118360 | similar to hypothetical proteins [Bacillus subtilis] | 263 | 7.80E-53 |
| EF029-2 | gi\|673492 | nuclease [Staphylococcus aureus] > pir\|A00790\|NCSAF micrococcal | 320 | 2.20E-39 |
| EF029-2 | gi\|532653 | thermonuclease [Staphylococcus hyicus] | 155 | 9.10E-39 |
| EF029-2 | gi\|47146 | thermonuclease [Staphylococcus intermedius] > pir\|15260791 S26079 | 145 | 4.90E-3 2 |
| EF030-2 | gi\|48808 | dciAE [Bacillus subtilis] | 149 | 1.10E-66 |
| EF030-2 | gnl\|PID\|e118149 | (AJ002571) DppE [Bacillus subtilis] > gnl\|PID\|e1183316 | 149 | 1.50E-66 |
| EF030-2 | pir\|S16651\|S166 | dciAE protein - Bacillus subtilis | 149 | 5.90E-66 |
| EF030-2 | gi\|309662 | heromone bindin protein [Plasmid CF10] >irB53309B53309 | 227 | 7.40E-52 |
| EF030-2 | gnl\|PID\|d101185 | TRAC [Enterococcus faecalis] | 237 | 7.40E-52 |
| EF030-2 | gnl\|PID d100655 | TraC [Enterococcus faecalis] | 233 | 9.70E-51 |
| EF030-2 | gi\|388269 | traC [Plasmid pAD 1] > pir\|A53310\|A53310 pheromone cADi binding | 229 | 3.00E-48 |
| EF030-2 | gi\|312940 | threonine kinase [Streptococcus equisimilis] > pir\|S28153\|S28153 | 277 | 3.00E-45 |
| EF030-2 | gi\|47802 | Opp A (AA1-542) [Salmonella typhimurium] > gi\|47808 precursor | 125 | 8.50E-34 |
| EF030-2 | gi\|2688227 | (AB001139) oligopeptide ABC transporter, periplasmic | 211 | 4.80E-31 |
| EF030-2 | gi\|2281458 | (AF000366) oligopeptide permease homolog All [Borrelia burgdorferi] | 211 | 4.80E-31 |
| EF030-2 | gi\|40005 | OppA gene product [Bacillus subtilis] | 148 | 1.20E-30 |
| EF030-2 | gi\|143603 | sporulation protein [Bacillus subtilis] > gnl\|PID\|e1183163 | 144 | 4.80E-30 |
| EF030-2 | gi\|2281468 | (AF000948) OppAJV [Borrelia burgdorferil > gi\|2689891 (AE000792) | 210 | 2.10E-29 |
| EF030-2 | gil\|574679 | oligopeptide binding protein (oppA) [Haemophilus influenzae] | 148 | 6.00E-29 |
| EF033-2 | gnl\|PID\|e118439 | similar to iron-binding protein [Bacillus subtilis] | 164 | 2.60E-14 |
| EF033-2 | pir\|S54437\|S544 | hemin binding protein - Yersinia enterocolitica | 108 | 1.40E-ll |
| EF033-2 | gi\|1619623 | hemin binding protein [Yersinia enterocolitica] | 108 | 2.00E-ll |
| EF036-2 | gnl\|PID\|d101022 | 0RF108 [Bacillus subtilis] > gnl\|PID\|e1185766 alternate gene | 544 | 1.20E-96 |
| EF036-2 | gi\|2622858 | (AE000929) phosphate-binding protein PstS [Methanobacterium | 183 | 1.401E-45 |
| EF036-2 | gi\|2622859 | (AE000929) phosphate-binding protein PstS homolog [Methanobacterium | 158 | 2.40E-41 |
| EF036-2 | gi\|2688115 | (AB001132) phosphate ABC transporter, periplasmic phosphate-binding | 117 | 1.10E-12 |
| EF037-2 | gi\|2352482 | (AF005097) unknown [Lactococcus lactis] | 141 | 1.10E-23 |
| EF040-2 | gi\|1657516 | hypothetical protein [Escherichia coli] > gi\|178651 1 (AE000139) | 208 | 1.90E-29 |
| EF040-2 | gi\|293265 | 2-5A-dependent RNase [Mus musculus] > pir\|1B457711B45771 | 105 | 1.00E-17 |
| EF040-2 | gi\|287865 | G9a [Homo sapiens] > pir\|S30385\|S30385 G9a protein - human | 143 | 8.30E-14 |
| EF040-2 | gi\|311817 | erythroid ankyrin [Mus musculus] > pir\|S37771\|S37771 ankyrin, | 119 | 4.80E-13 |
| EF040-2 | gi\|191940 | ankyrin [Mus musculus] > pir\|I49502\|I149502 ankyrin - mouse | 119 | 4.90E-13 |
| EF040-2 | gi\|747710 | alt. ankyrin (variant 2.2) [Homo sapiens] | 120 | 1.501E-12 |
| EF040-2 | gi\|178646 | ankyrin [Homo sapiens] | 120 | 1.80E-12 |
| EF040-2 | gil\|1845265 | ankyrin [Homo sapiens] | 120 | 1.80E-12 |
| EF040-2 | pir\|A35049\|A350 | ankyrin 1, erythrocyte splice form 2 - human | 120 | 1.80E-12 |
| EF040-2 | pir\|B35049\|B350 | ankyrin 1, erythrocyte splice form 3 - human | 120 | 1.80E-12 |
| EF040-2 | gi\|28702 | ankyrin (variant 2.1) [Homo sapiens] > pir\|SO8275ISJHUK ankyrmn 1, | 120 | 1.80E-12 |
| EF041-2 | gi\|388269 | traC [Plasmid pAD1] > pir\|jA53310jA53310 pheromone cADi binding | 670 | 1.40E-87 |
| EF041-2 | gnl\|PID\|d100655 | TraC [Enterococcus faecalis] | 662 | 1.50E-85 |
| EF041-2 | gnl\|PID\|di01185 | TRAC [Enterococcus faecalis] | 662 | 1.50E-85 |
| EF041-2 | gi\|309662 | pheromone binding protein [Plasmid pCF10] > pir\|1B53309\|B53309 | 648 | 1.20E-83 |
| EF041-2 | gi\|48808 | dciAE [Bacillus subtilis] | 218 | 1.20E-57 |
| EF041-2 | gnl\|PID\|e118149 | (AJ002571) DppE [Bacillus subtilis] > gnl\|PID\|e1183316 | 218 | 1.40E-57 |
| EF041-2 | pir\|S16651\|S166 | dciAE protein - Bacillus subtilis | 218 | 2.10E-56 |
| EF041-2 | gi\|882550 | ORF f535 [Escherichia coli] > gi\|1789397 (AE000384) f535; This 535 aa | 146 | 7.30E-40 |
| EF041-2 | gi\|143603 | sporulation protein [Bacillus subtilis] > gnl\|PID\|e1183163 | 278 | 1.00E-34 |
| EF041-2 | gi\|40005 | OppA gene product [Bacillus subtilis] | 279 | 1.00E-34 |
| EF041-2 | gi\|47802 | Opp A (AA1-542) [Salmonella typhimurium] > gi\|47808 precursor | 141 | 6.60E-30 |
| EF041-2 | gi\|304925 | periplasmic oligopeptide binding protein [Escherichia coli] | 160 | 1.90E-29 |
| EF041-2 | gi\|1574679 | oligopeptide binding protein (oppA) [Haemophilus influenzae] | 163 | 1.00E-28 |
| EF041-2 | gi\|147014 | oligopeptide binding protein precursor [Escherichia coil] | 160 | 1.50E-28 |
| EF041-2 | gi\|2253286 | (AF005657) plasminogen binding protein [Borrelia burgdorferi] | 134 | 5.00E-27 |
| EF045-2 | gi\|308854 | oligopeptide binding protein [Lactococcus lactis] > pir\|E53290\|E53290 | 437 | 3.20E-125 |
| EF045-2 | gi\|495181 | oligopeptide binding protein [Lactococcus lactis] | 426 | 9.70E-124 |
| EF045-2 | gi\|677945 | AppA [Bacillus subtilis] > gnl\|PIDIe1183158 oligopeptide ABC | 154 | 2.30E-3 1 |
| EF045-2 | gi\|293014 | peptide-binding protein [Lactococcus lactis] > pir\|B47098 | 158 | 2.40E-14 |
| EF048-2 | gi\|1574060 | hypothetical [Haemophilus influenzae] > pir\|164164\|164164 | 250 | 2.3 OE-4 1 |
| EF048-2 | dbj\|AB001488_2 | (AB001488) SIMILAR TO C4-DICARBOXYLATE-BINDING PERIPLASMIC | 208 | 3.60E-34 |
| EF048-2 | gi\|466717 | No definition line found [Escherichia coli] > gi\|1790004 (AE000435) | 199 | 1.30E-30 |
| EF048-2 | gi\|46006 | periplasmic C4-dicarboxylate binding-protein [Rhodobacter capsulatus] | 162 | 1.40E-25 |
| EF048-2 | gi\|1573102 | hypothetical [Haemophilus influenzae] > pir\|H64143\|H64143 | 244 | 3.80E-25 |
| EF048-2 | gi\|2182530 | (AE000085) Y4mM [Rhizobium sp. NGR234] | 114 | 5.60E-18 |
| EF048-2 | gi\|1572999 | hypothetical [Haemophilus influenzae] > pir\|E64141\|E64141 | 116 | 5.90E-15 |
| EF049-2 | gi\|149581 | maturation protein [Lactobacillus paracasei] > pir\|A44858\|A44858 | 241 | 2.40E-55 |
| EF049-2 | gi\|47198 | ORE (AA 1 to 299) [Lactococcus lactis cremoris] > pir\|15080831508083 | 239 | 1.00E-54 |
| EF049-2 | gi\|432402 | maturation protein [Lactococcus lactis] > gi\|623055 proteinase | 239 | 6.20E-54 |
| EF049-2 | gi\|472835 | ORF1 [Lactococcus lactis cremoris] | 241 | 1.50E-53 |
| EF049-2 | gi\|39782 | 33kDa lipoprotein [Bacillus subtilis] > gnl\|PID\|e325 181.33kDa | 128 | 8.90E-40 |
| EF051-2 | gnl PID\|di01142 | molybdate-binding periplasmic protein [Synechocystis sp.] | 173 | 3.20E-50 |
| EF051-2 | gnl\|PID\|e118602 | alternate gene name: yvsD; similar to molybdate-binding | 314 | 5.90E-50 |
| EF051-2 | gi\|1574546 | lsg locus hypothetical [Haemophilus influenzael > pir\|A641751 | 161 | 2.20E-43 |
| EF051-2 | gi\|504498 | periplasmic molybdate-binding protein [Escherichia coli] > gi\|1147817 | 148 | 1.40E-30 |
| EF051-2 | gi\|148939 | ORE 8 [Haemopbilus influenzae] > pir\|S27583\|S27583 hypothetical | 150 | 8.10E-28 |
| EF054-2 | gi\|150556 | surface protein [Plasmid pCF10] > pir\|A41826\|A41826 probable | 1490 | 1.80E-192 |
| EF054-2 | gnl\|PID\|e236571 | cell wall anchoring signal [Enterococcus faecalis] | 515 | 8.10E-64 |
| EF054-2 | gi\|45738 | ORFC [Enterococcus faecalis] > pir\|JH0204\|JH0204 hypothetical 30.5K | 372 | 1.60E-58 |
| EF054-2 | gi\|496520 | orf iota [Streptococcus pyogenes] > pir\|S68125\|S45091 hypothetical | 362 | 1.30E-43 |
| EF054-2 | gi\|160693 | sporozoite surface protein [Plasmodium yoelii] > pir\|A45559\|A45559 | 286 | 4.30E-33 |
| EF054-2 | gi\|1813523 | PbTRAP [Plasmodium berghei] | 305 | 1.30E-32 |
| EF054-2 | gnl\|PID\|e225687 | zinc finger protein [Mus musculus] > gnl\|PID\|e225688 zinc | 246 | 3.60E-26 |
| EF054-2 | gi\|2290394 | IgG and IgE immunoreactive antigen recognized by sera from patients | 242 | 1.40E-25 |
| EF054-2 | gi\|2290392 | IgG and IgE immunoreactive antigen recognized by sera from patients | 237 | 7.80E-25 |
| EF054-2 | gi\|46523 | B antigen [Streptococcus agalactiae] | 232 | 2.80E-23 |
| EF054-2 | pir\|S15330\|FCSO | IgA Fc receptor precursor - Streptococcus agalactiac | 228 | 1.00E-22 |
| EF054-2 | gi\|1620100 | Pro- and Glu-rich, PENPEV (10x); similar to Streptococcus B | 210 | 3.10E-21 |
| EF054-2 | gi\|63686 | NF-M c-terminus [Gallus gallus] | 222 | 6.90E-21 |
| EF054-2 | gi\|63689 | NF-M protein [Gallus gallus] > pir\|S15762\|S15762 neurofilament triplet | 222 | 8.50E-21 |
| EF054-2 | gi\|757867 | TATA-box like sequence (Usil) [Human herpesvirus 1] > gi\|291493 18 | 194 | 4.10E-19 |
| EF059-2 | gnl\|PID\|e236571 | cell wall anchoring signal [Enterococcus faecalis] | 418 | 5.60E-95 |
| EF059-2 | gi\|150556 | surface protein [PlasmidpCF10] > pir\|A41826\|A41826 probable | 606 | 3.70E-87 |
| EF059-2 | gi\|45738 | ORFC [Enterococcus faecalis] > pir\|JH0204\|JH0204 hypothetical 30.5K | 366 | 9.30E-50 |
| EF059-2 | gi\|496520 | orf iota [Streptococcus pyogenes] > pir\|S68125\|S45091 hypothetical | 367 | 5.90E-44 |
| EF059-2 | gi\|160693 | sporozoite surface protein [Plasmodium yoelii] > pir\|A45559\|A45559 | 344 | 1.10E-38 |
| EF059-2 | gi\|1813523 | PbTRAP [Plasmodium berghei] | 295 | 2.50E-32 |
| EF059-2 | gi\|2290394 | JgG and IgE immunoreactive antigen recognized by sera from patients | 251 | 3.00E-29 |
| EF059-2 | gi\|2290392 | JgG and 1gB immunoreactive antigen recognized by sera from patients | 251 | 3.40E-29 |
| EF059-2 | gi\|1620100 | Pro- and Glu-rich, PENPEV (10x); similar to Streptococcus B | 253 | 6.40E-27 |
| EF059-2 | gi\|46521 | Fc receptor [Streptococcus agalactiae] > pir\|A60234\|A60234 IgA Fc | 197 | 2.70E-26 |
| EF059-2 | gi~46523 | B antigen [Streptococcus agalactiae] | 232 | 9.30E-26 |
| EF059-2 | pirlSl5330~FCSO | IgA Fc receptor precursor - Streptococcus agalactiae | 232 | 9.30E-26 |
| EF059-2 | gnl\|PID\|e225687 | zinc finger protein [Mus musculus] > gnl\|PID\|e225688 zinc | 234 | 1.40E-22 |
| EF059-2 | gi\|425356 | zona pellucida protein [Pseudopleuronectes americanus] | 229 | 1.00E-21 |
| EF059-2 | gi\|457769 | Collagen [Bombyx mon] > pir\|S42886\|S42886 collagen - silkworm | 209 | 7.60E-19 |
| EF061-2 | gnl\|PID\|e236571 | cell wall anchoring signal [Enterococcus faecalis] | 925 | 8.10E-118 |
| EF061-2 | gi\|150556 | surface protein [PlasmidpCF10] > pir\|A41826\|A41826 probable | 350 | 1.50E-107 |
| EF061-2 | gi\|496520 | orf iota [Streptococcus pyogenes] > pir\|S68125\|S45091 hypothetical | 308 | 1.40E-58 |
| EF061-2 | gi\|45738 | ORFC [Enterococcus faecalis] > pir\|JH0204\|JH0204 hypothetical 30.5K | 322 | 6.40E-50 |
| EF061-2 | gi\|1813523 | PbTRAP [Plasmodium berghei] | 263 | 1.00E-26 |
| EF061-2 | gi\|160693 | sporozoite surface protein [Plasmodium yoelii] > pir\|A45559\|A45559 | 241 | 9.00E-25 |
| EF061-2 | gi\|63686 | NF-M c-terminus [Gallus gallus] | 232 | 2.10E-22 |
| EF061-2 | gi\|63689 | NF-M protein [Gallus gallus] > pir\|S15762\|S15762 neurofilament triplet | 232 | 2.60E-22 |
| EF06l-2 | gi\|2290392 | IgG and IgE immunoreactive antigen recognized by sera from patients | 176 | 2.40E-21 |
| EF061-2 | gi\|1620100 | Pro- and Glu-rich, PENPEV (10x); similar to Streptococcus B | 165 | 2.70E-20 |
| EF061-2 | gnl\|PID\|e225687 | zinc finger protein [Mus musculusi > gnl\|PID\|e225688 zinc | 197 | 7.80E-19 |
| EF061-2 | gi\|160355 | interspersed repeat antigen [Plasmodium falciparum] | 199 | 8.20E-18 |
| EF061-2 | gi\|410750 | interspersed repeat antigen [Plasmodium falciparum] | 199 | 8.90E-18 |
| EF061-2 | gi\|22903 88 | IgG and IgE immunoreactive antigen recognized by sera from patients | 182 | 1.40E- 17 |
| EF061-2 | gi\|2290394 | IgG and IgE immunoreactive antigen recognized by sera from patients | 180 | 2.80E-17 |
| EF062-2 | gi\|47049 | asal gene product (AA1-1296) [Enterococcus faecalis] | 3716 | 0 |
| EF062-2 | gi\|43324 | aggregation substance (ASPi) [Enterococcus faecalis] | 4003 | 0 |
| EF062-2 | gi\|2109266 | aggregation substance [Enterococcus faecium] | 5523 | 0 |
| EF062-2 | gi\|150555 | aggregation substance [Plasmid pCF10] > pir\|H41662\|H41662 150K mating | 63380 | |
| EF062-2 | gil\|100973 | SspB precursor [Streptococcus gordonii] | 110 | 9.90E-39 |
| EF062-2 | gi\|47248 | PAc protein precursor (AA-38 to 1527) [Streptococcus mutans] | 107 | 1.70E-38 |
| EF062-2 | gnl\|PID\|d101507 | surface protein antigen precursor [Streptococcus sobrinus] | 132 | 5.00E-36 |
| EF062-2 | gi\|47267 | cell surface antigen 1/11 [Streptococcus mutans] > pir\|S06839\|S06839 | 107 | 6.50E-36 |
| EF062-2 | bbs\|148453 | SpaA = endocarditis immunodominant antigen [Streptococcus sobrinus, | 132 | 1.20E-35 |
| EF062-2 | gi\|47620 | antigen I/ [Streptococcus sobrinus] > pir\|A60338\|A60338 surface | 132 | 2.90E-35 |
| EF062-2 | pir\|A35\|861A351 | salivary agglutinin receptor precursor - Streptococcus | 109 | 2.10E-34 |
| EF062-2 | gil\|100971 | SspA [Streptococcus gordonii] | 110 | 3.80E-32 |
| EF062-2 | gil\|100975 | SspA [Streptococcus gordonii] | 110 | 2.30E-21 |
| EF063-2 | gi\|47049 | asal gene product (AA 1-1296) [Enterococcus faecalis] | 3716 | 0 |
| EF063-2 | gi\|43324 | aggregation substance (ASPi) [Enterococcus faecalis] | 4003 | 0 |
| EF063-2 | gi\|2109266 | aggregation substance [Enterococcus faecium] | 5523 | 0 |
| EF063-2 | gi\|150555 | aggregation substance [Plasmid pCF10] > pir\|H41662\|H41662 150K mating | 6338 | 0 |
| EF063-2 | gil\|100973 | SspB precursor [Streptococcus gordonii] | 110 | 9.90E-39 |
| EF063-2 | gi\|47248 | PAc protein precursor (AA-38 to 1527) [Streptococcus mutans] | 107 | 1.70E-38 |
| EF063-2 | gnl\|PID\|d101507 | surface protein antigen precursor [Streptococcus sobrinus] | 132 | 5.00E-36 |
| EF063-2 | gi\|47267 | cell surface antigen Jill [Streptococcus mutans] > pir\|506839\|506839 | 107 | 6.50E-36 |
| EF063-2 | bbs\|148453 | SpaA= endocarditis immunodominant antigen [Streptococcus sobrinus, | 132 | 1.20E-35 |
| EF063-2 | gi\|47620 | antigen I/II [Streptococcus sobrinus] > pir\|A60338\|A60338 surface | 132 | 2.90E-35 |
| EF062-2 | pir\|A35186\|A351 | salivary agglutinin receptor precursor - Streptococcus | 109 | 2.10E-34 |
| EF063-2 | gil\|100971 | SspA [Streptococcus gordoniil | 110 | 3.80E-32 |
| EF063-2 | gi\|1100975 | SspA [Streptococcus gordonii] | 110 | 2.30E-21 |
| EF064-2 | gi\|47049 | asal gene product (AA 1-1296) [Enterococcus faecalis] | 3716 | 0 |
| EF064-2 | gi\|43324 | aggregation substance (ASP 1) [Enterococcus faecalis] | 4003 | 0 |
| EF064-2 | gi\|2109266 | aggregation substance [Enterococcus faecium] | 5523 | 0 |
| EF064-2 | gi\|150555 | aggregation substance [Plasmid pCF10] > pir\|H41662\|H41662 150K mating | 6338 | 0 |
| EF064-2 | gil\|100973 | SspB precursor [Streptococcus gordonii] | 110 | 9.90E-39 |
| EF064-2 | gi\|47248 | PAc protein precursor (AA -38 to 1527) [Streptococcus mutans] | 107 | 1.70E-38 |
| EF064-2 | gnl\|PID\|d101507 | surface protein antigen precursor [Streptococcus sobrinus] | 132 | 5.00E-36 |
| EF064-2 | gi\|47267 | cell surface antigen Jill [Streptococcus mutans] > pir\|1506839 | 107 | 6.50E-36 |
| EF064-2 | bbs\|148453 | SpaA= endocarditis immunodominant antigen [Streptococcus sobrinus, | 132 | 1.20E-35 |
| EF064-2 | gi\|47620 | antigen I/II [Streptococcus sobrinus] > pir\|A60338\|A60338 surface | 132 | 2.90E-35 |
| EF064-2 | pir\|A35\|86\|A351 | salivary agglutinin receptor precursor - Streptococcus | 109 | 2.10E-34 |
| EF064-2 | gil\|1100971 | SspA [Streptococcus gordonii] | 110 | 3.80E-32 |
| EF064-2 | gi\|1100975 | SspA [Streptococcus gordonii] | 110 | 2.30E-21 |
| EF068-2 | gi\|790398 | T06D8.1 [Caenorhabditis elegans] | 137 | 8.50E-17 |
| EF068-2 | gnl\|PID\|d102084 | membrane glycoprotein [Equine herpesvirus 1] | 210 | 5.80E-16 |
| EF068-2 | gi\|2286204 | (AF011339) unknown [Acinetobacter calcoaceticus] | 121 | 8.40E-16 |
| EF068-2 | gi\|330862 | membrane glycoprotein [Equine herpesvirus 1] > pir\|H36802\|VGBEX1 | 208 | 1.10E-15 |
| EF068-2 | gi\|1707247 | partial CDS [Caenorhabditis elegans] | 131 | 3.70E-15 |
| EF068-2 | gnl\|PTD\|d102O84 | membrane glycoprotein [Equine herpesvirus 1] | 203 | 6.20E-15 |
| EF068-2 | gi\|213392 | antifreeze glycoprotein [Notothenia coriiceps] > pir\|A38420\|A38420 | 102 | 4.60E-13 |
| EF068-2 | gnl\|PID\|e125464 | (AL022022) PGRS-family protein [Mycobacterium tuberculosis] | 145 | 1.50E-12 |
| EF068-2 | gi\|951460 | FIM-C.1 gene product [Xenopus laevis] > pir\|A45155\|A45155 mucin | 109 | 2.70E-12 |
| EF069-2 | gi\|790398 | T06D8.1 [Caenorhabditis elegans] | 137 | 8.50E-17 |
| EF069-2 | gnl\|PID\|d102084 | membrane glycoprotein [Equine herpesvirus 1] | 210 | 5.80E-16 |
| EF069-2 | gi\|2286204 | (AF011339) unknown [Acinetobacter calcoaceticus] | 121 | 8.40E-16 |
| EF069-2 | giF330862 | membrane glycoprotein [Equine herpesvirus 1] > pir\|H36802\|VGBEX1 | 208 | 1.10E-15 |
| EF069-2 | gi\|1707247 | partial CDS [Caenorhabditis elegans] | 131 | 3.70E-15 |
| EF069-2 | gnl\|PID\|d102084 | membrane glycoprotein [Equine herpesvirus 1] | 203 | 6.20E-15 |
| EF069-2 | gi\|213392 | antifreeze glycoprotein [Notothenia coriiceps] > pir\|A38420\|A38420 | 102 | 4.60E- 13 |
| EF069-2 | gnl\|PID e125464 | (AL022022) PGRS-family protein [Mycobacterium tuberculosis] | 145 | 1.50E-12 |
| EF069-2 | gi\|951460 | FIM-C.1 gene product [Xenopus laevis] > pir\|A45155\|A45155 mucin | 109 | 2.70E-12 |
| EF070-2 | gi\|790398 | T06D8.1 [Caenorhabditis elegans] | 137 | 8.50E-17 |
| EF070-2 | gnl\|PID\|d102084 | membrane glycoprotein [Equine herpesvirus 1] | 210 | 5.80E-16 |
| EF070-2 | gi\|2286204 | (AF011339) unknown [Acinetobacter calcoaceticus] | 121 | 8.40E-16 |
| EF070-2 | gi\|330862 | membrane glycoprotein [Equine herpesvirus 1] > pir\|H36802\|VGBEX1 | 208 | 1.10E-15 |
| EF070-2 | gi\|1707247 | partial CDS [Caenorhabditis elegans] | 131 | 3.70E-15 |
| EF070-2 | gnl\|PID\|d102084 | membrane glycoprotein [Equine herpesvirus 1] | 203 | 6.20E-15 |
| EF070-2 | gi\|213392 | antifreeze glycoprotein [Notothenia coriiceps] > pir\|A38420\|A38420 | 102 | 4.60E- 13 |
| EF070-2 | gnl\|PID\|e125464 | (AL022022) PGRS-family protein [Mycobacterium tuberculosis] | 145 | 1.50E-12 |
| EF070-2 | gi\|951460 | FIM-C.1 gene product [Xenopus laevis] > pir\|A45155\|A45155 mucin | 109 | 2.70E-12 |
| EF071-2 | gnl\|PID\|e306428 | unnamed protein product [Bacteriophage nt] > gi\|1353566 Lysin | 127 | 2.00E-37 |
| EF071-2 | gi\|853751 | N-acetylmuramoyl-L-alanine amidase [Bacteriophage A511] 2732.60E-36 | | |
| EF073-2 | gi\|143830 | xpaC [Bacillus subtilis] > gnl\|PID\|d1005803 hydrolysis of | 173 | 7.10E-16 |
| EF074-2 | gi\|1256698 | chitinase [Serratia marcescens] > gi\|1256698 chitinase [Serratia | 618 | 2.60E-104 |
| EF074-2 | gi\|763985 | chitinase A [Vibrio harveyi] | 526 | 2.80E-84 |
| EF075-2 | gi\|143156 | membrane bound protein [Bacillus subtilis] > gnl\|PID\|e1184471 | 593 | 1.70E-91 |
| EF075-2 | pir\|D70070\|D700 | transcriptional regulator homolog ywtF - Bacillus subtilis | 118 | 1.90E-59 |
| EF075-2 | gij\|762327 | putative transcriptional regulator [Bacillus subtilis] | 148 | 9.60E-53 |
| EF07S-2 | gil\|1276874 | EpsA [Streptococcus thermophilus] | 239 | 2.20E-33 |
| EF07S-2 | gui\|PID\|e289126 | unknown [Streptococcus pneumoniae] | 150 | 1.20E-27 |
| EF075-2 | gi\|485275 | putative regulatory protein [Streptococcus pneumoniae] | 150 | 2.50E-27 |
| EF075-2 | gi\|2804735 | (AF030367) putative regulatory protein [Streptococcus pneumoniae] | 150 | 2.50E-27 |
| EF075-2 | gi\|2804747 | (AF030369) putative regulatory protein [Streptococcus pneumoniae] | 150 | 2.50E-27 |
| EF075-2 | gnl\|PID\|e116988 | capsular polysaccharide synthesis protein [Streptococcus | 148 | 5.30E-27 |
| EF075-2 | gi\|2804769 | (AF030373) putative regulatory protein [Streptococcus pneumoniae] | 148 | 5.30E-27 |
| EF075-2 | gi\|147744 | PSR [Enterococcus hirae] | 109 | 2.10E-23 |
| EF075-2 | gi\|790435 | PSR [Enterococcus faecium] > pir\|1554177\|554177 PSR protein | 102 | 4.40E-19 |
| EF075-2 | gi\|12267239 | ORF 1 [Staphylococcus epidermidis] | 109 | 8.50E-19 |
| EF075-2 | gnl\|PID\|d101895 | membrane bound protein LytR [Synechocystis sp.] | 121 | 2.80E-16 |
| EF077-2 | gnl\|PID\|di01135 | cadmium-transporting ATPase [Synechocystis sp.] | 396 | 2.30E-113 |
| EF077-2 | gi\|150719 | cadmium resistance protein [Plasmid p1258] > pir\|A3256\|1A32561 | 373 | 8.60E-112 |
| EF077-2 | gi\|143753 | cadmium-efflux ATPase [Bacillus firmus] > pir\|D42707\|D42707 probable | 361 | 8.10E-111 |
| EF077-2 | gi\|152978 | E1-E2 cadmium efflux adenosine triphosphatase [Staphylococcus | 381 | 4.30E-110 |
| EF077-2 | gnl\|PID\|e248808 | unknown [Mycobacterium tuberculosis] | 298 | 3.50E-107 |
| EF077-2 | gi\|495646 | ATPase [Transposon Tn5422] | 361 | 2.10E-106 |
| EF077-2 | gnl\|PI\|D\|e118497 | similar to heavy metal-transporting ATPase [Bacillus | 286 | 3.50E-104 |
| EF077-2 | gi\|1699049 | cadmium resistance protein [Lactococcus lactis] | 352 | 3.60E-100 |
| EF077-2 | gnl\|PID\|e118603 | similar to heavy metal-transporting ATPase [Bacillus | 254 | 9.90E-100 |
| EF077-2 | gnl\|PID\|e306540 | unknown [Mycobacterium tuberculosis] | 352 | 5.20E-88 |
| EF077-2 | gnl\|PID\|e263525 | P-type ATPase [Mycobacterium tuberculosis] > gnl\|PID\|e249413 | 199 | 5.50E-86 |
| EF077-2 | gnl\|PID\|e264090 | unknown [Mycobacterium tuberculosis] | 250 | 3.00E-84 |
| EF077-2 | gnl\|PID\|d101135 | cadmium-transporting ATPase [Synechocystis sp.] | 260 | 1.00E-81 |
| EF077-2 | gi\|1773166 | probable copper-transporting atpase [Escherichia coli] > gi\|1786691 | 212 | 4.70E-80 |
| EF077-2 | gi\|1354935 | probable copper-transporting atpase [Escherichia coli] | 212 | 8.50E-79 |
| EF078-2 | gi\|143331 | alkaline phosphatase regulatory protein [Bacillus subtilis] | 257 | 5.50E-58 |
| EF078-2 | gi\|410142 | ORFX18 [Bacillus subtilis] > gnl\|PID\|e1185580 two-component sensor | 235 | 8.20E-51 |
| EF078-2 | gnl\|PID\|d101196 | homologous to sp:PHOR BACSU [Bacillus subtilis] | 219 | 4.20E-44 |
| EF078-2 | gi\|1575578 | histidine protein kinase [Thermotoga maritima] | 191 | 7.10E-44 |
| EF078-2 | gi\|2182990 | histidine kinase [Lactococcus lactis cremoris] | 169 | 6.40E-40 |
| EF078-2 | gi\|2 182992 | histidine kinase [Lactococcus lactis cremoris] | 152 | 1.10E-39 |
| EF078-2 | gnl\|PID\|d101134 | sensory transduction histidine kinase [Synechocystis sp.] | 259 | 3.90E-38 |
| EF078-2 | gi\|149296 | phosphate regulatory protein phoR (gtg start codon) [Kiebsiella | 228 | 7.60E-33 |
| EF078-2 | gi\|581 188 | phoR gene product (AA 1-431) [Escherichia coli] > gi\|1657596 | 226 | 1.60E-32 |
| EF078-2 | gnl\|PID\|d101087 | sensory transduction histidine kinase [Synechocystis sp.] | 138 | 3.70E-32 |
| EF078-2 | gnl\|P11) e266592 | unknown [Mycobacterium tuberculosis] | 232 | 1.10E-31 |
| EF078-2 | gil2 182996 | histidine kinase [Lactococcus lactis cremoris] | 206 | 1.30E-31 |
| EF078-2 | gnl\|PID\|d101135 | sensory transduction histidine kinase [Synechocystis sp.] | 256 | 1.30E-31 |
| EF078-2 | gi\|294893 | phosphate regulatory protein phoR (gtg start codon) [Shigella | 225 | 1.60E-3 1 |
| EF078-2 | gi\|288420 | drug sensory protein A [Synechocystis PCC6803] > gnl\|PID\|d1017420 | 106 | 2.50E-31 |
| EF079-2 | gi\|2098719 | putative fimbrial-associated protein [Actinomyces naeslundii] | 183 | 8.60E-26 |
| EF081-2 | gi\|467806 | penicillin-binding protein [Enterococcus faecalis] | 1356 | 2.10E-178 |
| EF081-2 | gi\|790429 | low affinity penicillin-binding protein 5 (PBP5) [Enterococcus | 607 | 1.00E-78 |
| EF081-2 | gnl\|PID e208365 | penicillin-binding protein 5 [Enterococcus faecium] | 604 | 1.10E-78 |
| EF081-2 | gi\|790433 | low affinity penicillin-binding protein 5 (PBP5) [Enterococcus | 604 | 2.70E-78 |
| EF081-2 | gi\|790437 | low affinity penicillin-binding protein 5 (PBP5) [Enterococcus | 602 | 5.10E-78 |
| EF081-2 | gi\|790431 | low affinity penicillin-binding protein 5 (PBP5) [Enterococcus | 591 | 2.60E-77 |
| EF081-2 | gi\|43342 | D-alanyl-D-alanine carboxypeptidase [Enterococcus hirae] | 587 | 9.30E-77 |
| EF081-2 | gi\|49000 | D-alanyl-D-alanine carboxypeptidase [Enterococcus hirae] | 572 | 5.20E-74 |
| EF081-2 | gn\|PID\|d100794 | penicillin-binding protein 2 [Bacillus subtilis] | 149 | 7.40E-24 |
| EF081-2 | gnl\|PID\|e315088 | MecAl [Staphylococcus sciuri] | 111 | 4.40E-19 |
| EF081-2 | gnl\|PID\|e286651 | MecA protein [Staphylococcus sciuri] | 106 | 2.90E-18 |
| EF081-2 | gnl\|PID\|e316581 | MecA protein [Staphylococcus sciuri] | 111 | 2.90E-18 |
| EF081-2 | gnl\|PID\|e316607 | MecA2 protein [Staphylococcus sciuri] | 101 | 3.70E-14 |
| EF081-2 | gnl\|PID\|e316613 | MecA protein [Staphylococcus sciuri] > gi\|46613 mecA gene | 101 | 3.70E-14 |
| EF083-2 | gi\|496283 | lysin [Bacteriophage Tuc2009] | 436 | 6.20E-176 |
| EF083-2 | gi\|530798 | LysB [Bacteriophage phi-LC3] | 421 | 3.00E-175 |
| EF083-2 | gil\|66183 | muramidase [Bacteriophage CP-7] | 186 | 1.20E-21 |
| EF083-2 | gi\|166188 | muramidase [Bacteriophage CP-9] > pir\|JQ0438\|MUBPC9 | 188 | 5.00E-21 |
| EF083-2 | gi\|623084 | muramidase; muramidase [Bacteriophage LL-HI | 193 | 8.40E-20 |
| EF083-2 | gi\|166175 | muramidase [Bacteriophage CP-1] | 175 | 3.40E-19 |
| EF083-2 | gnl\|PID\|e22 1272 | lysozyme [Bacteriophage CP-1] > pir\|A31086\|MUBPCP | 175 | 3.40E-19 |
| EF083-2 | pir\|JQ0437\|MUBP | N-acetylmuramoyl-L-alanine amidase (EC 3.5.1.28) - phage | 171 | 9.50E-19 |
| EF083-2 | gi\|410502 | LysA [Bacteriophage mv4] > pir\|S38477\|S38477 lytic enzyme lysA | 187 | 8.90E-17 |
| EF083-2 | gi\|793850 | lysin [Lactobacillus bacteriophage phi adh] > gnl\|PID\|e1217314 lysin | 117 | 5.60E-15 |
| EF084-2 | gi\|2293312 | (AF008220) YtfP [Bacillus subtilis] > gnl\|PID\|e1185879 similar to | 438 | 1.70E-140 |
| EF084-2 | gi\|2367234 | (AE000425) hypothetical 43.8 kD protein in rhsB-pit intergenic | 167 | 2.20E-51 |
| EF084-2 | gi\|912464 | No definition line found [Escherichia coli] | 167 | 6.00E-51 |
| EF084-2 | gnl\|PID\|d101127 | hypothetical protein [Synechocystis sp.] > pir\|1576678 | 151 | 6.10E-42 |
| EF084-2 | gi\|1573954 | hypothetical [Haemophilus influenzae] > pir\|G64161\|G64161 | 142 | 2.90E-40 |
| EF085-2 | gi\|1209527 | protein histidine kinase [Enterococcus faecalis] | 2023 | 8.00E-279 |
| EF085-2 | gi\|467057 | phoR; B2168_C3_247 [Mycobacterium leprae] > pir\|S72905\|S72905 | 226 | 8.80E-23 |
| EF085-2 | gnl\|PID\|e119229 | SenX3 [Mycobacterium bovis BCG] | 222 | 3.10E-22 |
| EF085-2 | gnl\|PID\|e255152 | unknown [Mycobacterium tuberculosis] > gnl\|PID\|e321546 SenX3 | 222 | 3.10E-22 |
| EF085-2 | gi\|1778485 | PcoS homolog [Escherichiacoli] > gi\|1786783 (AE000162) f480; This | 111 | 3.80E-16 |
| EF085-2 | gi\|149296 | hos hate regulato rotein hoR (gtg start codon) [Kiebsiella | 110 | 1.40E-14 |
| EF085-2 | gi\|581188 | phoR gene product (AA 1-431) [Escherichia coli] > gi\|1657596 | 103 | 5.30E-14 |
| EF085-2 | gi\|143331 | alkaline phosphatase regulatory protein [Bacillus subtilis] | 118 | 4.90E-13 |
| EF085-2 | gi\|537239 | alternate gene name phoM; CG Site No. 395 [Escherichia coli] | 126 | 9.501E-13 |
| EF085-2 | gi\|147251 | phoM [Escherichia coli] > gi\|809670 phoM protein (1 is 3rd base in | 126 | 9.50E-13 |
| EF085-2 | gi\|2182992 | histidine kinase [Lactococcus lactis cremoris] | 109 | 5.90E-12 |
| EF086-2 | gi\|437706 | alternative truncated translation product from E. coli[Streptococcus | 221 | 3.00E-54 |
| EF086-2 | gi\|437705 | hyaluronidase [Streptococcus pneumoniae] | 221 | 1.60E-53 |
| EF086-2 | gi\|595847 | hyaluronate lyase [Streptococcus agalactiae] > pir\|A55137\|A55137 | 203 | 3.30E-44 |
| EF086-2 | gi\|705406 | hyaluronate lyase [Staphylococcus aureus] | 191 | 3.40E-42 |
| EF086-2 | gi\|862086 | hyaluronidase [Propionibacterium acnes] | 198 | 6.00E-27 |
| EF087-2 | gi\|437706 | alternative truncated translation product from E. coli[Streptococcus | 221 | 3.00E-54 |
| EF087-2 | gi\|437705 | hyaluronidase [Streptococcus pneumoniae] | 221 | 1.60E-53 |
| EF087-2 | gi\|595847 | hyaluronate lyase [Streptococcus agalactiae] > pir\|A55137\|A55137 | 203 | 3.30E-44 |
| EF087-2 | gi\|705406 | hyaluronate lyase [Staphylococcus aureus] | 191 | 3.40E-42 |
| EF087-2 | gi\|562086 | hyaluronidase [Propionibacterium acnes] | 198 | 6.00E-27 |
| EF088-2 | gi\|437706 | alternative truncated translation product from E. coli[Streptococcus | 221 | 3.00E-54 |
| EF088-2 | gi\|437705 | hyaluronidase [Streptococcus pneumoniae] | 221 | 1.60E-53 |
| EF088-2 | gi\|595847 | hyaluronate lyase [Streptococcus agalactiae] > pir\|A55137\|A55137 | 203 | 3.30E-44 |
| EF088-2 | gi\|705406 | hyaluronate lyase [Staphylococcus aureus] | 191 | 3.40E-42 |
| EF088-2 | gi\|562086 | hyaluronidase [Propionibacterium acnes] | 198 | 6.00E-27 |
| EF091-2 | gi\|556016 | similar to plant water stress proteins; ORF2 [Bacillus subtilis] | 198 | 5.50E-21 |
| EF091-2 | gi\|2353333 | (AF016513) Ce-LEA [Caenorhabditis elegans] | 189 | 2.40E-17 |
| EF091-2 | gui\|PID\|e353216 | seed maturation protein homolog [Arabidopsis thaliana] | 146 | 3.60E-11 |
| EF091-2 | gil\|1161171 | late embryogenesis abundant protein [Picea glauca] | 132 | 5.70E-11 |
| EF091-2 | pir\|504909\|5049 | embryonic protein DC8 (clone 8/10) - carrot | 127 | 6.50E-11 |
| EF092-2 | gi\|2689898 | (AE000792) PTS system, cellobiose-specific IIB component (celA) | 145 | 4.00E-27 |
| EF092-2 | gul\|PID\|d102048 | B. subtilis, cellobiose phosphotransferase system, celA; | 116 | 1.40E-26 |
| EF096-2 | gi\|147329 | transport protein [Escherichia coli] > gnl\|PID\|d1015409 | 532 | 2.10E-91 |
| EF096-2 | gi\|1573475 | spermidine/putrescine-binding periplasmic protein precursor (potD) | 527 | 1.10E-79 |
| EF096-2 | gi\|1574803 | spermidine/putrescine-binding periplasmic protein precursor (potD) | 468 | 1.60E-75 |
| EF096-2 | gi\|142681 | Lpp38 [Pasteurella haemolytica] | 446 | 4.401E-72 |
| EF096-2 | gul\|PP d101526 | Putrescine transport protein PotF [Escherichia coli] | 216 | 1.50E-54 |
| EF096-2 | gi\|147334 | periplasmic putrescine binding protein [Escherichia coli] | 216 | 2.10E-53 |
| EF096-2 | gi\|2688565 | (AB001165) spermidine/putrescine ABC transporter, | 240 | 2.00E-48 |
| EF096-2 | gi\|881733 | PotD [Salmonella typhimurium] | 253 | 2.70E-28 |
| EF096-2 | gnl\|PID\|d101926 | spermidine/putrescine-binding periplasmic protein | 243 | 4.20E-26 |
| EF096-2 | gnl\|PID\|e152543 | potF gene product [Clostridium perfringens] | 204 | 3.30E-21 |
| EF097-2 | gi\|622991 | mannitol transport protein [Bacillus stearothermophilus] | 547 | 4.90E-93 |
| EF097-2 | gi\|42034 | mannitol permease [Escherichia coli] > gi\|466737 mannitol-specific | 535 | 5.50E-85 |
| EF097-2 | gi\|633650 | enzyme II(mannitol) [Staphylococcus camosus5] > pir\|S68193\|S22385 | 516 | 2.10E-82 |
| EF097-2 | gi\|882462 | protein-N(pi)-phosphohistidine-sugar phosphotransferase [Escherichia | 509 | 3.00E-76 |
| EF097-2 | gi\|312763 | protein-N(pi)-phosphohistidine-sugar phosphotransferase [Escherichia | 357 | 7.50E-70 |
| EF097-2 | gnl\|PTD\|d100966 | homologue of mannitol transport protein of B. | 492 | 3.10E-62 |
| EF097-2 | gnl PP d100792 | mannitol-specific phophotransferase enzyme II [Bacillus | 484 | 5.20E-61 |
| EF097-2 | gi\|1673 855 | (AE000020) Mycoplasma pneumoniae, PTS system mannitol-specific | 232 | 3.50E-59 |
| EF097-2 | gnl\|PP\|d100651 | phosphotransferase enzymell, mannitol-specific [Mycoplasma | 158 | 8.20E-18 |
| EF097-2 | pir\|577757\|5777 | hosphotransferase system enzyme II (BC 2.7.1.69), | 103 | 2.00E-13 |
| EF100-2 | gi\|2058546 | ComYC [Streptococcus gordonii] | 193 | 7.30E-27 |
| EF100-2 | gi\|2058546 | ComYC [Streptococcus gordonii] | 193 | 7.30E-27 |
| EF100-2 | gi\|142708 | comG3 gene product [Bacillus subtilis] > gnl\|PPI\|e1185739 comGC | 150 | 2.90E-22 |
| EF100-2 | gi\|142708 | comG3 gene product [Bacillus subtilis] > gnl\|PID\|e1185739 comGC | 150 | 2.90E-22 |
| EF100-2 | gi\|148437 | secretory component [Erwinia chrysanthemi] > pir\|E47021\|E47021 pectic | 134 | 4.40E-15 |
| EF100-2 | gi\|148437 | secretory component [Erwinia chrysanthemi] > pir\|E47021\|E47021 pectic | 134 | 4.40E-15 |
| EF100-2 | gi\|606262 | ORE_o145 [Escherichia coli] > gi\|693706 HopG [Escherichia coli] | 136 | 9.10E-13 |
| EF100-2 | gi\|606262 | ORE_o145 [Escherichia coli] > gi\|693706 HopG [Eseherichia coli] | 136 | 9.10E-13 |
| EF100-2 | gi\|38828 | ExeG gene product [Aeromonas hydrophila] > pir\|S22910\|I49905 protein | 132 | 3.50E-12 |
| EF100-2 | gi\|38828 | ExeG gene product [Aeromonas hydrophila] > pir\|S22910\|I49905 protein | 132 | 3.50E-12 |
| EF100-2 | gnl\|PID\|e117259 | etpG [Escherichia coli] | 131 | 5.10E-12 |
| EF100-2 | gnl\|PID\|e117259 | etpG [Escherichia coli] | 131 | 5.10E-12 |
| EF100-2 | gi\|42189 | outG gene product [Erwinia carotovora] > pir\|S32861\|S32861 outG | 130 | 9.90E-12 |
| EF100-2 | gi\|42189 | outG gene product [Erwinia carotovora] > pir\|S32861\|S32861 outG | 130 | 9.90E-12 |
| EF100-2 | gi\|609628 | putative [Vibrio cholerae] | 128 | 1.60E-11 |
| EF100-2 | gi\|609628 | putative [Vibrio cholerae] | 128 | 1.60E-11 |
| EF101-2 | gnl\|PID\|d102573 | bacG [Enterococcus faecalis] | 106 | 3.60E-17 |
| EF101-2 | gnl\|PID\|e321943 | hypothetical protein [Enterococcus faecalis] > gnl\|PID\|e321943 | 105 | 1.80E-16 |
| EF101-2 | gnl\|PID\|e118502 | similar to hypothetical proteins from B.subtilis [Bacillus | 113 | 1.80E-15 |
| EF110-2 | gi\|43338 | Staphylococcal serine proteinase homologtLe [Enterococcus faecalis] | 1462 | 2.30E-195 |
| EF110-2 | gnl\|PID\|d100108 | glutamic acid specific protease prepropeptide [Staphylococcus | 106 | 3.70E-14 |
| EF110-2 | gi\|46687 | preproenzyme (AA -68 to 268) [Staphylococcus aureus] | 106 | 6.70E-14 |
| EF111-2 | gi\|606018 | ORF 0783 [Escherichia coli] > gi\|1789462 (AE000390) hypothetical 88.3 | 477 | 8.10E-80 |
| EF121-2 | gi\|2626826 | YfkN [Bacillus subtilis] > gnl\|PTD\|e1182774 similar to | 143 | 1.30E-96 |
| EF121-2 | gi\|2313187 | (A1E000532) 2′,3′-cyclic-nucleotide 2′-phosphodiesterase (cpdB) | 413 | 2.60E-82 |
| EF121-2 | gi\|48453 | 5′-nucleotidase [Vibrio parahaemolyticus] > gnl\|PID\|d1001218 | 279 | 8.50E-47 |
| EF121-2 | gi\|757842 | UDP-sugar hydrolase [Escherichia coli] | 239 | 1.60E-44 |
| EF121-2 | gi\|1773162 | UDP-sugar hydrolase precursor [Escherichia coli] > gi\|1786687 | 239 | 1.60E-44 |
| EF121-2 | gi\|47950 | precursor polypeptide (AA -25 to 525) [Salmonella typhimurium] | 229 | 2.10E-41 |
| EF121-2 | gi\|747913 | 2′,3 ′-cyclic-nucleotide 2′-phosphodiesterase [Yersinia | 115 | 4.70E-36 |
| EF121-2 | gi\|62772 | nucleotidase [Discopyge ommata] > pir\|S19564\|S195645-nucleotidase | 137 | 5.80E-35 |
| EF121-2 | gi\|573573 | 2′,3′-cyclic-nucleotide 2′-phosphodiesterase (cpdB) [Haemophilus | 114 | 8.90E-34 |
| EF121-2 | gi\|537054 | 2t,3′-cyclic-nucleotide 2′-phosphodiesterase [Escherichia coli] | 110 | 1.10E-31 |
| EF121-2 | bbs\|135915 | 5t-nucleotidase= glycosylphosphatidylinositol-anchored protein {EC | 128 | 7.70E-29 |
| EF121-2 | gi\|1737443 | 5′-nucleotidase [Boophilus microplus] | 104 | 1.60E-28 |
| EF121-2 | gi\|202551 | 5′-nucleotidase precursor (BC 3.1.3.5) [Rattus norvegicus] | 138 | 6.10E-28 |
| EF121-2 | gi\|349783 | ecto-5′-nucleotidase [Mus musculus] > pir\|JC2001\|JC2001 | 136 | 1.10E-27 |
| EF121-2 | gi\|23897 | 5′-nucleotidase [Homo sapiens] > pir\|S11032\|S11032 5′-nucleotidase (EC | 133 | 1.60E-27 |
| EF122-2 | gi\|2626826 | YIkN [Bacillus subtilisi > gnl\|PID\|e1182774 similar to | 143 | 1.30E-96 |
| EF122-2 | gi\|2313187 | (AE000532) 2′,3′-cyclic-nucleotide 2′-phosphodiesterase (cpdB) | 413 | 2.60E-82 |
| EF122-2 | gi\|48453 | 5′-nucleotidase [Vibrio parahaemolyticus] > gnl\|PID\|d1001218 | 279 | 8.50E-47 |
| EF122-2 | gi\|757842 | UDP-sugar hydrolase [Escherichia coli] | 239 | 1.60E-44 |
| EF122-2 | gi\|1773 162 | UDP-sugar hydrolase precursor [Escherichia coli] > gi\|1786687 | 239 | 1.60E-44 |
| EF122-2 | gi\|47950 | precursor polypeptide (AA -25 to 525) [Salmonella typhimurium] | 229 | 2.10E-41 |
| EF122-2 | gi\|7479 13 | 2′,3′-cyclic-nucleotide 2′-phosphodiesterase [Yersinia | 115 | 4.70E-36 |
| EF122-2 | gi\|62772 | 5-nucleotidase [Discopyge ommata] > pir\|S19564\|S195645′-nucleotidase | 137 | 5.80E-35 |
| EF122-2 | gi\|1573573 | 2′,3′-cyclic-nucleotide 2′-phosphodiesterase (cpdB) [Haemophilus | 114 | 8.90E-34 |
| EF122-2 | gi\|537054 | 2′,3′-cyclic-nucleotide 2′-phosphodiesterase [Escherichia coli] | 110 | 1.10E-31 |
| EF122-2 | bbs\|1359155 | 5′-nucleotidase= glycosylphosphatidylinositol-anchored protein {EC | 128 | 7.70E-29 |
| EF122-2 | gi\|1737443 | 5′-nucleotidase [Boophilus microplus] | 104 | 1.60E-28 |
| EF122-2 | gi\|202551 | 5′-nucleotidase precursor (EC 3.1.3.5) [Rattus norvegicus] | 138 | 6.10E-28 |
| EF122-2 | gi\|349783 | ecto-5′-nucleotidase [Mus musculus] > pir\|JC2001\|JC2001 | 136 | 1.10E-27 |
| EF122-2 | gi\|23897 | 5′-nucleotidase [Homo sapiens] > pir\|S11032\|S11032 5-nucleotidase (EC | 133 | 1.60E-27 |
| EF129-2 | gi\|43334 | P54 protein [Enterococcus faecium] > pir\|S05542\|S05542 hypothetical | 630 | 9.40E-79 |
| EF129-2 | gi\|512521 | usp 45 gene product [Lactococcus lactis] > pir\|IN0097\|IN0097 secreted | 374 | 1.30E-42 |
| EF129-2 | gi\|149525 | secreted protein [Lactococcus lactis] | 371 | 3.60E-42 |
| EF129-2 | gnl\|PTD e313022 | hypothetical protein [Bacillus subtilis] > gnl\|PID\|e1186168 | 317 | 2.30E-33 |
| EF130-2 | gi\|488339 | alpha-amylase [unidentified cloning vector] | 621 | 6.70E-81 |
| EF130-2 | gi\|488336 | ORF [unidentified cloning vector] | 242 | 8.00E-27 |
| EF130-2 | bbs 112518 | alpha-amylase {N-terminal region} [Artificial sequence, Peptide | 237 | 4.80E-26 |
| EF130-2 | gnl\|PID e289144 | ywpE [Bacillus subtilis] > gnl\|PID\|e1184540 ywpE [Bacillus | 129 | 5.401E-l 1 |
| EF131-2 | gnl\|PID e118528 | penicillin-binding protein [Bacillus subtilis] | 277 | 7.40E-43 |
| EF131-2 | gi\|488330 | alpha-amylase [unidentified cloning vector] | 280 | 1.30E-31 |
| EF131-2 | gi\|509249 | No definition line found [Lactobacillus plantarum] | 274 | 1.10E-30 |
| EF131-2 | gnl\|PID\|d10249l | (AB009635) Fmt [Staphylococcus aureus] | 170 | 5.60E-20 |
| EF131-2 | gi\|515050 | DD-peptidase precursor [Streptomyces lividans] > pir\|S48220\|548220 | 131 | 2.30E-14 |
| EF131-2 | gi\|153448 | serine DD-peptidase [Streptomyces lividans] | 131 | 1.20E-12 |
| EF132-2 | gi\|153826 | adhesin B [Streptococcus sanguis] > pir\|jA43583\|A43583 adhesin B | 1257 | 2.30E-166 |
| EF132-2 | gi\|1184932 | ScbA [Streptococcus crista] | 1248 | 3.70E-165 |
| EF132-2 | gi\|310633 | adhesin [Streptococcus gordonii] | 1247 | 5.10E-165 |
| EF132-2 | gi\|1393269 | adhesion protein [Streptococcus pneumoniae] | 1204 | 3.40E-163 |
| EF132-2 | gi\|1575030 | surface adhesin A precursor [Streptococcus pneumoniae] | 1220 | 2.40E-161 |
| EF132-2 | gi\|153834 | adhesin specific for salivary pellicle of dental surfaces | 1203 | 4.80E-159 |
| EF132-2 | gil\|117994 | surface antigen A variant precursor [Streptococcus pneumoniae] | 1191 | 2.00E-157 |
| EF132-2 | gi\|493 017 | endocarditis specific antigen [Enterococcus faecalis] | 931 | 3.70E-122 |
| EF132-2 | gnl\|PID\|e255529 | lipoprotein [Staphylococcus epidermidis] | 453 | 3.20E-92 |
| EF132-2 | gi\|1245464 | YfeA [Yersinia pestis] > gi\|1245464 YfeA [Yersinia pestis] | 364 | 3.60E-64 |
| EF132-2 | gi\|1573330 | adhesin B precursor (fimA) [Haemophilus influenzae] | 349 | 3.50E-63 |
| EF132-2 | gi\|755075 | periplasmic-binding protein [Synechocystis sp.] > gnl\|PID\|d1018652 Mn | 326 | 6.80E-62 |
| EF132-2 | gn\|PID\|e118595 | similar to ABC transporter (membrane protein) [Bacillus | 174 | 3.10E-32 |
| EF132-2 | gil\|1777933 | TroA [Treponema pallidum] | 171 | 3.40E-32 |
| EF132-2 | gi\|790546 | Trompi [Treponema pallidum] | 171 | 5.10E-32 |
| | Derwent Access | | BLAST | BLAST P- |
| Query | Access. No. | Derwent Gene Description | Score | Value |
| EF002-2 | gi\|2338759 | (AF018073) periplasmic sorbitol-binding protein; SmoE [Rhodobacter | 113 | 3.60E-18 |
| EF003-2 | W20909 | H. pylori outer membrane protein 14ge10705orf5. | 268 | 4.20E-39 |
| EF003-2 | W20166 | Helicobacter pylori outer membrane protein, 16225006.aa. | 241 | 3.00E-27 |
| EF006-2 | W20909 | H. pylon outer membrane protein 14ge10705orf5. | 283 | 1.20E-48 |
| EF006-2 | W20166 | Helicobacterpyloni outer membrane protein, 16225006.aa. | 266 | 1.10E-30 |
| EF008-2 | R37495 | Pneumococcal fimbrial protein A. | 967 | 1.20E-127 |
| EF008-2 | W26367 | Staphylococcus aureus saliva binding protein. | 467 | 7.50E-100 |
| EF008-2 | R79722 | ROM precursor TROMP 1. | 181 | 8.00E-36 |
| EF008-2 | W22134 | Treponema pallidum rare outer membrane protein (TROMP-i). | 181 | 8.00E-36 |
| EF009-2 | W20909 | H. pylori outer membrane protein 14ge10705orf5. | 319 | 1.40E-53 |
| EF009-2 | W20166 | Helicobacter pylori outer membrane protein, 16225006.aa. | 278 | 2.50E-32 |
| EF012-2 | R48035 | Hyaluronic acid synthase of Streptococcus equisimilis. | 227 | 3.20E-69 |
| EF014-2 | W14070 | S.thermophilus exopolysacchanide biosynthesis protein EpsR. | 103 | 5.90E-19 |
| EF014-2 | W22 169 | S.thermophilus exopolysaccharide synthesis operon epsA gene product. | 103 | 7.30E-18 |
| EF016-2 | W15799 | Adherence factor 104R of Lactobacillus fermentum. | 157 | 9.60E-22 |
| EF016-2 | W15793 | Adherence factor consensus sequence. | 103 | 1.00E-l1 |
| EF017-2 | R48035 | Hyaluronic acid synthase of Streptococcus equisimilis. | 241 | 8.90E-71 |
| EF021-2 | R31013 | P39-alpha. | 141 | 1.60E-19 |
| EF021-2 | R33280 | P39-beta. | 134 | 7.00E-14 |
| EF022-2 | R48035 | Hyaluronic acid synthase of Streptococcus equisimilis. | 324 | 2.20E-65 |
| EF023-2 | R48035 | Hyaluronic acid synthase of Streptococcus equisimilis. | 155 | 9.90E-33 |
| EF023-2 | R70152 | Streptococcus pneumoniae strain SPRU98 PipA. | 125 | 5.90E-17 |
| EF027-2 | R48035 | Hyaluronic acid synthase of Streptococcus equisimilis. | 233 | 2.20E-34 |
| EF028-2 | Wi 7830 | Thermophilic alkaline phosphatase. | 202 | 7.70E-59 |
| EF028-2 | Wi 1568 | E. colialkaline phosphatase mutant D153H1Q329A. | 182 | 7.90E-56 |
| EF028-2 | Wi 1570 | E. colialkaline phosphatase mutant D153H/K328H/Q329A. | 182 | 7.90E-56 |
| EF028-2 | W26300 | E. colialkaline phosphatase mutant D153H1K328H1Q329A/D330H. | 182 | 1.10E-55 |
| EF028-2 | W11565 | E. colialkaline phosphatase mutant D153H1K328H/D330A. | 182 | 3.10E-55 |
| EF028-2 | W11557 | E. colialkaline phosphatase mutant D153H/D330N. | 182 | 4.30E-55 |
| EF028-2 | W11561 | E. colialkaline phosphatase mutant D15311/D330A. | 182 | 4.30E-55 |
| EF028-2 | W11555 | E. colialkaline phosphatase mutant D153H1K328H1D330N. | 182 | 4.70E-55 |
| EF028-2 | W11566 | E. colialkaline phosphatase mutant D153H/K328H1D330L. | 182 | 1.20E-54 |
| EF028-2 | W11569 | E. colialkaline phosphatase mutant K328H/Q329A. | 180 | 1.70E-54 |
| EF028-2 | W11562 | E. colialkaline phosphatase mutant D153HfD330L. | 182 | 1.70E-54 |
| EF028-2 | R26980 | Fv(FRP5)-phoA recombinant antibody. | 174 | 1.90E-54 |
| EF028-2 | W11567 | E. colialkaline phosphatase mutant Q329A. | 179 | 2.30E-54 |
| EF028-2 | W11558 | E. colialkaline phosphatase mutant K328H/D330N. | 176 | 6.40E-54 |
| EF028-2 | W11563 | E. colialkaline phosphatase mutant K328H/D330A. | 176 | 6.40E-54 |
| EF029-2 | R10044 | Plasmid pOW360 encoded Human Growth Hormone (HGH) - nuclease A | 320 | 3.50E-40 |
| EF029-2 | R10041 | Plasmid pOW350 nuclease A product. | 320 | 4.30E-40 |
| EF029-2 | R73997 | Staphylococcus aureus (Foggi) nuclease signal and mature sequences. | 320 | 5.60E-40 |
| EF029-2 | R10043 | Plasmid pOW360 encoding Human Growth Hormone (HGH) - nuclease | 320 | 2.90E-38 |
| EF030-2 | R48035 | Hyaluronic acid synthase of Streptococcus equisimilis. | 277 | 6.10E-47 |
| EF040-2 | R59077 | 2-5A-dependent RNA-ase. | 105 | 1.90E-i8 |
| EF040-2 | W12703 | Mouse 2-5A-dependent RNase. | 105 | 1.90E-i8 |
| EF040-2 | R82661 | Partial murine 2-5A-dependent RiNase. | 105 | 1.90E-18 |
| EF041-2 | R48035 | Hyaluronic acid synthase of Streptococcus equisimilis. | 225 | 6.30E-26 |
| EF0S4-2 | R26042 | P.yoelii 55P2 antigen. | 286 | 8.00E-34 |
| EF054-2 | R85782 | Group B Streptococcal mutant beta antigen without IgA binding domain. | 232 | 3.30E-24 |
| EF054-2 | R85781 | Group B Streptococcal wild-type beta antigen. | 232 | 5.20E-24 |
| EF054-2 | P91941 | Sequence of preprospasmolysin. | 204 | 3.10E-19 |
| EF054-2 | W32519 | Collagen-like polypeptide SEQ ID NO:2. | 180 | 7.50E-18 |
| EF054-2 | W12324 | Silver halide emulsion protein monomeric repeat unit #2. | 180 | 7.50E-18 |
| EF054-2 | W32522 | Collagen-like polypeptide SEQ ID NO:5. | 192 | 1.60E-17 |
| EF054-2 | W12327 | Silver halide emulsion protein monomeric repeat unit #5. | 192 | 1.60E-17 |
| EF054-2 | W32520 | Collagen-like polypeptide SEQ ID NO:3. | 189 | 2.40E-17 |
| EF054-2 | W32532 | Collagen-like polypeptide SEQ ID NO:15. | 189 | 2.40E-17 |
| EF054-2 | W12325 | Silver halide emulsion protein monomeric repeat unit #3. | 189 | 2.40E-17 |
| EF054-2 | W12337 | Silver halide emulsion protein monomeric repeat unit #15. | 189 | 2.40E-17 |
| EF054-2 | W12341 | Silver halide emulsion FLAG(RTM)-tagged protein #2. | 189 | 2.60E-17 |
| EF054-2 | W02098 | S.mutans antigen 1111. | 161 | 5.40E-15 |
| EF054-2 | W02096 | S.mutans antigen 1/TI fragment (aa803-1 114). | 161 | 1.90E-13 |
| EF059-2 | R26042 | P.yoelii 55P2 antigen. | 344 | 1.90E-39 |
| EF059-2 | R85782 | Group B Streptococcal mutant beta antigen without IgA binding domain. | 232 | 1.1 0E-26 |
| EF059-2 | R85781 | Group B Streptococcal wild-type beta antigen. | 232 | 1.70E-26 |
| EF05 9-2 | P91941 | Sequence of preprospasmolysin. | 200 | 1.50E-18 |
| EF059-2 | P60570 | Sequence of the Falciparum Interspersed Repeat Antigen | 186 | 4.60E-18 |
| EF059-2 | W02096 | S.mutans antigen Jill fragment (aa803-l 114). | 167 | 8.20E-16 |
| EF059-2 | W02098 | S.mutans antigen Jil1. | 167 | 4.90E-15 |
| EF059-2 | R79625 | Endocarditis specific antigen region. | 147 | 4.40E-12 |
| EF059-2 | R26049 | MSF precursor. | 143 | 1.30E-11 |
| EF059-2 | R28150 | Sugar beet chitinase 1. | 148 | 1.70E-11 |
| EF059-2 | R26842 | Protease from S.Aureus ATCC12600. | 147 | 2.10E-11 |
| EF059-2 | R79643 | Immunodominant antigen of Streptococcus sobrinus. | 151 | 2.10E-11 |
| EF059-2 | W07539 | Collagen like protein (CLP). | 146 | 3.00E-11 |
| EF061-2 | R26042 | P.yoelii SSP2 antigen. | 241 | 1.701E-25 |
| EF061-2 | P60570 | Sequence of the Falciparum Interspersed Repeat Antigen | 199 | 1.60E-18 |
| EF061-2 | R85782 | Group B Streptococcal mutant beta antigen without IgA binding domain. | 153 | 2.40E-14 |
| EF061-2 | R85781 | Group B Streptococcal wild-type beta antigen. | 153 | 3.60E-14 |
| EF061-2 | P91941 | Sequence of preprospasmolysin. | 163 | 9.70E-14 |
| EF061-2 | P83194 | Sequence of a bioadhesive precursor protein encoded by cDNA clone | 156 | 7.90E-13 |
| EF061-2 | R28150 | Sugar beet chitinase 1. | 156 | 9.10E-13 |
| EF061-2 | W02096 | S.mutans antigen Jill fragment (aa803-1 114). | 148 | 1.20E-12 |
| EF061-2 | P82971 | Bioadhesive precursor protein from cDNA 52. | 148 | 9.70E-12 |
| EF061-2 | W02098 | S.mutans antigen 1111. | 148 | 1.50E-11 |
| EF062-2 | W02098 | S.mutans antigen 1111. | 107 | 1.20E-36 |
| EF062-2 | R79643 | Immunodominant antigen of Streptococcus sobrinus. | 132 | 3.00E-36 |
| EF063-2 | W02098 | S.mutans antigen JIl1. | 107 | 1.20E-36 |
| EF063-2 | R79643 | Immunodominant antigen of Streptococcus sobrinus. | 132 | 3.00E-36 |
| EF064-2 | W02098 | S.mutans antigen 1111. | 107 | 1.20E-36 |
| EF064-2 | R79643 | Immunodominant antigen of Streptococcus sobrinus. | 132 | 3.00E-36 |
| EF071-2 | R85294 | Phage R1-t LytR lysin. | 127 | 3.70E-38 |
| EF071-2 | R9 1515 | Listeria phage lysin PLY5 11. | 273 | 4.70E-37 |
| EF075-2 | W14070 | S.thermophilus exopolysaccharide biosynthesis protein EpsR. | 239 | 4.20E-36 |
| EF075-2 | W22 169 | S.thermophilus exopolysaccharide synthesis operon epsA gene product. | 239 | 4.00E-34 |
| EF077-2 | R97280 | Helicobacter-specific ATPase 439. | 258 | 4.10E-74 |
| EF077-2 | R48036 | Mycobacterium BCG immunogen. | 192 | 2.20E-67 |
| EF077-2 | W06712 | Helicobacter-specific ATPase 948 (ORF-4). | 220 | 2.50E-67 |
| EF077-2 | R70419 | Rat homologue of human Wilson disease gene ATP7B. | 186 | 9.80E-54 |
| EF077-2 | R72343 | Wilson disease protein ATP7B. | 176 | 6.70E-40 |
| EF077-2 | R06376 | Product of the sscl gene. | 166 | 3.10E-28 |
| EF077-2 | R75396 | Flea sodium pump alpha subunit. | 146 | 2.40E-25 |
| EF077-2 | W20891 | H. pylori transporter protein, 14ce20219orf1. | 156 | 8.60E-14 |
| EF078-2 | R56667 | Bacteroides fragilis RprX regulatory response protein. | 148 | 8.30E-18 |
| EF078-2 | R74630 | Tomato TGETR1 ethylene response protein. | 130 | 7.80E-13 |
| EF078-2 | R69849 | Ethylene response (ETR) gene product. | 128 | 1.70E-11 |
| EF078-2 | R69850 | Ethylene response (ETR) mutant protein etrl-1. | 128 | 1.70E-11 |
| EF078-2 | R69851 | Ethylene response (ETR) mutant protein etrl-2. | 128 | 1.70E-1l |
| EF078-2 | R69852 | Ethylene response (ETR) mutant protein etrl-3. | 128 | 1.70E-11 |
| EF078-2 | R69853 | Ethylene response (ETR) mutant protein etrl-4. | 128 | 1.70E-11 |
| EF078-2 | R24296 | Regulatory protein VanS involved in glycopeptide resistance. | 142 | 2.70E-1 1 |
| EF081-2 | R27253 | Penicillin binding protein PBP2A-epi. | 101 | 4.70E-16 |
| EF081-2 | R27256 | Penicillin binding protein PBP2A-27R. | 101 | 6.00E-15 |
| EF081-2 | R27257 | Penicillin binding protein derivative #1. | 101 | 6.20E-15 |
| EF081-2 | R27258 | Penicillin binding protein derivative #2. | 101 | 6.20E-15 |
| EF081-2 | R27259 | Penicillin binding protein derivative #3. | 101 | 6.20E-15 |
| EF081-2 | R27260 | Penicillin binding protein derivative #4. | 101 | 6.20E-15 |
| EF081-2 | R2726 1 | Penicillin binding protein derivative #5. | 101 | 6.20E-15 |
| EF081-2 | R27263 | Penicillin binding protein derivative #7. | 101 | 6.20E-15 |
| EF081-2 | R27264 | Penicillin binding protein derivative #8. | 101 | 6.20E-15 |
| EF081-2 | R27262 | Penicillin binding protein derivative #6. | 101 | 6.50E-15 |
| EF081-2 | R30845 | Sequence encoded by the mec A gene. | 101 | 6.90E-15 |
| EF081-2 | R27255 | Penicillin binding protein PBP2A-27R. | 101 | 6.901E-15 |
| EF081-2 | R31216 | Penicillin binding protein PBP2A-27R.- | 101 | 7.00E-15 |
| EE110-2 | R91042 | VS mature protease (aal-213). | 106 | 6.60E-16 |
| EF110-2 | R91043 | VS mature protease (aal-214). | 106 | 7.20E-16 |
| EE110-2 | R91044 | VS mature protease (aal-215). | 106 | 7.80E-16 |
| EF110-2 | R26842 | Protease from S. Aureus ATCC12600. | 106 | 6.70E-15 |
| EF110-2 | R29644 | Protease from S. Aureus. | 106 | 1.20E-14 |
| EF110-2 | W22218 | Protein encoded by pV8RPT(-) construct. | 106 | 7.60E-14 |
| EF110-2 | R91033 | Beta-galactosidase-V8 protease fusion protein. | 106 | 7.60E-14 |
| EF110-2 | R91034 | Beta-galactosidase-V8 protease fusion protein. | 106 | 1.70E-13 |
| EF110-2 | W22219 | Protein encoded by pV8D construct. | 106 | 7.601E-13 |
| EE110-2 | R91035 | Recombinant VS protease V8D fusion protein. | 106 | 7.60E-13 |
| EF110-2 | W22220 | Protein encoded by pV8F construct. | 106 | 7.90E-13 |
| EF129-2 | R14530 | Usp45 protein. | 374 | 2.40E-43 |
| EF129-2 | R14150 | MSP encoded by pUCRS (DSM 5803). | 372 | 4.70E-43 |
| EF131-2 | R37495 | Pneumococcal fimbrial protein A. | 1185 | 6.80E-163 |
| EF131-2 | W26367 | Staphylococcus aureus saliva binding protein. | 418 | 3.70E-85 |
| EF131-2 | R79722 | ROM precursor TROMP 1. | 171 | 9.00E-31 |
| EF131-2 | W22134 | Treponema pallidum rare outer membrane protein (TROMP-1). | 171 | 9.00E-31 |

[0260] TABLE 3
Conservative Amino Acid Substitutions.

| | |
|---|---|
| Aromatic | Phenylalanine |
| | Tryptophan |
| | Tyrosine |
| Hydrophobic | Leucine |
| | Isoleucine |
| | Valine |
| Polar | Glutamine |
| | Asparagine |
| Basic | Arginine |
| | Lysine |
| | Histidine |
| Acidic | Aspartic Acid |
| | Glutamic Acid |
| Small | Alanine |
| | Serine |
| | Threonine |
| | Methionine |
| | Glycine |

[0261] TABLE 4
Residues Comprising Antigenic Epitope-Bearing Portion.

| | |
|---|---|
| EF001-2 | from about Asp-150 to about Lys-152, from about Ser-256 to |
| | about Tyr-259, from about Lys-360 to about Lys-363, from |
| | about Asn-406 to about Asp-408. |
| EF002-2 | from about Asp-80 to about Asp-83, from about Asp-281 to |
| | about Gly-283. |
| EF003-2 | from about Asn-263 to about Gly-266. |
| EF004-2 | from about Asn-23 to about Asn-26, from about Lys-83 to |
| | about Ser-87, from about Tyr-154 to about Asp-159. |
| EF005-2 | from about Lys-249 to about Glu-252. |
| EF006-2 | from about Gly-23 to about Asp-28. |
| EF008-2 | from about Thr-92 to about Gly-94, from about Pro-161 to |
| | about Asp-165, from about Gly-287 to about Thr-289. |
| EF010-2 | from about Pro-129 to about Asn-131. |
| EF012-2 | from about Asp-77 to about Asp-79, from about Asp-94 to |
| | about Lys-98, from about Asp-256 to about Thr-258, from |
| | about Glu-461 to about Asn-468. |
| EF013-2 | from about Thr-30 to about Asp-32, from about Glu-73 to |
| | about Ala-75, from about Gln-164 to about Asn-166, from |
| | about Lys-193 to about Gly-195. |
| EF014-2 | from about Ser-203 to about Asp-206, from about Gln-314 to |
| | about Gly-316 |
| EF015-2 | from about Pro-66 to about Gly-69. |
| EF016-2 | from about Lys-236 to about Asn-239. |
| EF017-2 | from about Ser-90 to about Gly-93, from about Thr-197 to |
| | about Lys-199, from about Lys-230 to about Asn-233, from |
| | about Ser-428 to about Gly-431. |
| EF018-2 | from about Lys-159 to about Tyr-161, from about Asn-165 to |
| | about Ser-167, from about Asn-250 to about Arg-256, from |
| | about Asn-392 to about Gly-395, from about Lys-416 to about |
| | Tyr-418, from about Asn-428 to about Arg-430. |
| EF019-2 | from about Arg-209 to about Ser-211, from about Lys-287 to |
| | about Ser-290. |
| EF020-2 | from about Lys-57 to about Asn-62. |
| EF021-2 | from about Ser-33 to about Gly-35, from about Glu-77 to |
| | about Gly-81, from about Asp-139 to about Lys-141, from |
| | about Glu-255 to about Ser-258, from about Gln-271 to about |
| | Tyr-277. |
| EF023-2 | from about Lys-232 to about Asp-234, from about Arg-304 to |
| | about Gly-306, from about Thr-453 to about Arg-456, from |
| | about Ser-478 to about Thr-480. |
| EF025-2 | from about Arg-183 to about Asp-185. |
| EF026-2 | from about Ser-25 to about Asp-30, from about Asp-90 to |
| | about Asp-94, from about Gln-107 to about Asn-110. |
| EF027-2 | from about Gln-72 to about Lys-74, from about Lys-229 to |
| | about Asp-231. |
| EF028-2 | from about Asp-186 to about Gln-188. |
| EF029-2 | from about Asp-118 to about Lys-122, from about Asp-124 to |
| | about Tyr-126. |
| EF031-2 | from about Glu-30 to about Gly-33. |
| EF034-2 | from about Glu-25 to about Gly-27, from about Glu-75 to |
| | about Thr-77. |
| EF36-2 | from about Gln-177 to about Ser-179. |
| EF037-2 | from about Ser-25 to about Asp-30, from about Asp-90 to |
| | about Asp-94, from about Gln-107 to about Asn-110. |
| EF038-2 | from about Asn-77 to about Lys-79, from about Tyr-88 to |
| | about Asn-92. |
| EF040-2 | from about Lys-167 to about Gly-172, from about Lys-240 to |
| | about Asn-242. |
| EF044-2 | from about Arg-192 to about Gly-194, from about Asn-200 to |
| | about Asn-203. |
| EF045-2 | from about Asp-159 to about Asn-161, from about His-172 to |
| | about Gly-174, from about Tyr-261 to about Gly-264, from |
| | about Lys-305 to about Glu-308. |
| EF046-2 | from about Ser-18 to about Gly-23, from about Gln-41 to |
| | about Ser-47, from about Thr-76 to about Asp-78. |
| EF047-2 | from about Asn-28 to about Asp-30, from about Asp-273 to |
| | about Asn-277. |
| EF048-2 | from about Asp-138 to about Lys-141, from about Asp-152 to |
| | about Gly-154. |
| EF051-2 | from about Asp-73 to about Gly-76. |
| EF053-2 | from about Ser-79 to about Gly-82. |
| EF055-2 | from about Asp-26 to about Gly-28, from about Gln-67 to |
| | about Asp-69, from about Arg-71 to about Gly-74, from about |
| | Arg-87 to about Gly-89. |
| EF056-2 | from about Arg-71 to about Gly-74, from about Arg-87 to |
| | about Gly-89. |
| EF058-2 | from about Lys-129 to about Gly-133, from about Gln-571 to |
| | about Tyr-573, from about Pro-586 to about Gly-591. |
| EF065-2 | from about Ser-236 to about Tyr-239, from about Asp-350 to |
| | about Gly-352, from about Lys-415 to about Asn-418, from |
| | about Arg-446 to about Asp-448, from about Asn-489 to |
| | about Lys-491, from about Ser-516 to about Asp-518, from |
| | about Glu-639 to about Lys-642. |
| EF066-2 | from about Ser-236 to about Tyr-239, from about Asp-350 to |
| | about Gly-352, from about Lys-415 to about Asn-418, from |
| | about Arg-446 to about Asp-448, from about Asn-489 to |
| | about Lys-491, from about Ser-516 to about Asp-518, from |
| | about Glu-639 to about Lys-642. |
| EF067-2 | from about Ser-236 to about Tyr-239, from about Asp-350 to |
| | about Gly-352, from about Lys-415 to about Asn-418, from |
| | about Arg-446 to about Asp-448, from about Asn-489 to |
| | about Lys-491, from about Ser-516 to about Asp-518, from |
| | about Glu-639 to about Lys-642. |
| EF073-2 | from about Met-98 to about Arg-100, from about Arg-110 to |
| | about Asp-112. |
| EF074-2 | from about Ser-53 to about Tyr-59, from about Ser-86 to |
| | about Gly-88, from about Pro-97 to about Gln-100, from |
| | about Gln-230 to about Gly-232. |
| EF076-2 | from about Asn-38 to about Tyr-40, from about Asp-48 to |
| | about Asn-53, from about Lys-79 to about Gly-81. |
| EF077-2 | from about Arg-411 to about Gly-413. |
| EF078-2 | from about Thr-294 to about Gly-296, from about Asp-366 to |
| | about Gln-368, from about Glu-524 to about Gly-526. |
| EF080-2 | from about Glu-164 to about Gly-166, from about Ser-206 to |
| | about Tyr-208, from about Lys-239 to about Gly-243. |
| EF081-2 | from about Asn-7 to about Ser-11, from about Lys-77 to about |
| | Tyr-80, from about Lys-112 to about Asn-114, from about |
| | Gly-162 to about Asp-164, from about Arg-181 to about |
| | Gly-183. |
| EF083-2 | from about Gln-38 to about Arg-40. |
| EF084-2 | from about Lys-140 to about Asp-142, from about Gly-164 to |
| | about Arg-166, from about Arg-262 to about Gly-264. |
| EF085-2 | from about Asn-95 to about Asp-97, from about Arg-112 to |
| | about Asp-114, from about Asp-258 to about Ser-260, from |
| | about Arg-401 to about Ser-403. |
| EF086-2 | from about Pro-112 to about Gly-115, from about Ser-222 to |
| | about Ser-224, from about Asn-296 to about Gly-299, from |
| | about Thr-346 to about Lys-348, from about Asp-428 to about |
| | Ser-432. |
| EF087-2 | from about Pro-112 to about Gly-115, from about Ser-222 to |
| | about Ser-224, from about Asn-296 to about Gly-299, from |
| | about Thr-346 to about Lys-348, from about Asp-428 to about |
| | Ser-432. |
| EF088-2 | from about Pro-112 to about Gly-115, from about Ser-222 to |
| | about Ser-224, from about Asn-296 to about Gly-299, from |
| | about Thr-346 to about Lys-348, from about Asp-428 to about |
| | Ser-432. |
| EF090-2 | from about Arg-2 to about Arg-5. |
| EF091-2 | from about Gln-40 to about Asp-43. |
| EF093-2 | from about Lys-95 to about Gly-97. |
| EF094-2 | from about Asp-314 to about Asp-316. |
| EF095-2 | from about Ser-328 to about Thr-330, from about Asp-359 to |
| | about Asp-363, from about Glu-637 to about Gly-639, from |
| | about Asn-744 to about Gly-746. |
| EF096-2 | from about Pro-128 to about Asn-130, from about Ser-193 to |
| | about Asp-196. |
| EF097-2 | from about Val-357 to about Gly-359. |
| EF099-2 | from about Glu-44 to about Asp-47, from about Lys-154 to |
| | about Gly-156, from about Asn-286 to about Asp-289. |
| EF101-2 | from about Lys-40 to about Asp-42, from about Pro-255 to |
| | about Asn-258, from about Lys-288 to about Gly-290. |
| EF102-2 | from about Asp-314 to about Asp-316. |
| EF103-2 | from about Asn-46 to about Gly-48. |
| EF104-2 | from about Pro-232 to about Lys-237, from about Ala-362 to |
| | about Asn-366, from about Ser-421 to about Gly-423, from |
| | about Lys-488 to about Ser-490, from about Asp-550 to about |
| | Asn-552, from about Pro-637 to about Lys-640, from about |
| | Asp-727 to about Gly-729, from about Asn-751 to about |
| | Ser-754, from about Lys-771 to about Asn-774, from about |
| | Ile-835 to about Asn-837, from about Pro-851 to about |
| | Gly-853. |
| EF105-2 | from about Ser-40 to about Gly-43, from about Asn-94 to |
| | about Gln-97, from about Gln-220 to about Gly-222, from |
| | about Asn-263 to about Gly-265. |
| EF106-2 | from about Asp-72 to about Gly-75, from about Thr-274 to |
| | about Asp-277, from about Asn-310 to about Arg-313. |
| EF107-2 | from about Thr-155 to about Asn-157, from about Thr-189 to |
| | about Asp-191, from about Arg-270 to about Gly-272, from |
| | about Thr-330 to about Lys-335, from about Asp-365 to about |
| | Asp-368, from about Pro-451 to about Asp-453, from about |
| | Gly-485 to about Thr-488. |
| EF108-2 | from about Lys-142 to about Trp-145, from about Thr-147 to |
| | about Tyr-150, from about Arg-212 to about Gly-214, from |
| | about Ser-248 to about Asp-251, from about Asp-384 to about |
| | Asp-387, from about Pro-481 to about Arg-483, from about |
| | Lys-491 to about Gly-494, from about Thr-619 to about |
| | Gly-624, from about Asp-656 to about Asp-659, from about |
| | Lys-717 to about Asn-721, from about Ser-822 to about |
| | Gly-824, from about Tyr-1137 to about Thr-1141. |
| EF110-2 | from about Pro-123 to about Gly-127, from about Thr-223 to |
| | about Gly-225. |
| EF111-2 | from about Lys-207 to about Asn-209, from about Asp-245 to |
| | about Asn-248, from about Lys-396 to about Asp-398, from |
| | about Glu-429 to about Ser-432, from about Thr-470 to about |
| | His-474. |
| EF119-2 | from about Asp-90 to about Asn-92, from about Gln-142 to |
| | about Gly-144. |
| EF121-2 | from about Asn-159 to about Asp-161, from about Asn-351 to |
| | about Lys-353, from about Pro-658 to about Gly-660, from |
| | about Lys-786 to about Ser-789. |
| EF122-2 | from about Asn-159 to about Asp-161, from about Asn-351 to |
| | about Lys-353, from about Pro-658 to about Gly-660, from |
| | about Lys-786 to about Ser-789. |
| EF123-2 | from about Asn-331 to about Arg-336, from about Asp-634 to |
| | about Gly-636, from about Glu-780 to about Ser-782, from |
| | about Tyr-909 to about Asn-911, from about Lys-939 to about |
| | Glu-942, from about Asp-1074 to about Gly-1076, from |
| | about Asp-1367 to about Gly-1369, from about Pro-1433 to |
| | about Lys-1435, from about Gly-1516 to about Asp-1518, |
| | from about Lys-1656 to about Asp-1660, from about |
| | Lys-1860 to about Gln-1863, from about Ser-1916 to about |
| | Gln-1919, from about Pro-1940 to about Gly-1942. |
| EF124-2 | from about Asn-331 to about Arg-336, from about Asp-634 to |
| | about Gly-636, from about Glu-780 to about Ser-782, from |
| | about Tyr-909 to about Asn-911, from about Lys-939 to about |
| | Glu-942, from about Asp-1074 to about Gly-1076, from about |
| | Asp-1367 to about Gly-1369, from about Pro-1433 to about |
| | Lys-1435, from about Gly-1516 to about Asp-1518, from |
| | about Lys-1656 to about Asp-1660, from about Lys-1860 to |
| | about Gln-1863, from about Ser-1916 to about Gln-1919, |
| | from about Pro-1940 to about Gly-1942. |
| EF125-2 | from about Asn-331 to about Arg-336, from about Asp-634 to |
| | about Gly-636, from about Glu-780 to about Ser-782, from |
| | about Tyr-909 to about Asn-911, from about Lys-939 to about |
| | Glu-942, from about Asp-1074 to about Gly-1076, from about |
| | Asp-1367 to about Gly-1369, from about Pro-1433 to about |
| | Lys-1435, from about Gly-1516 to about Asp-1518, from |
| | about Lys-1656 to about Asp-1660, from about Lys-1860 to |
| | about Gln-1863, from about Ser-1916 to about Gln-1919, |
| | from about Pro-1940 to about Gly-1942. |
| EF126-2 | from about Ser-236 to about Tyr-239, from about Asp-350 to |
| | about Gly-352, from about Lys-415 to about Asn-418, from |
| | about Arg-446 to about Asp-448, from about Asn-489 to |
| | about Lys-491, from about Ser-516 to about Asp-518, from |
| | about Glu-639 to about Lys-642. |
| EF127-2 | from about Ser-236 to about Tyr-239, from about Asp-350 to |
| | about Gly-352, from about Lys-415 to about Asn-418, from |
| | about Arg-446 to about Asp-448, from about Asn-489 to |
| | about Lys-491, from about Ser-516 to about Asp-518, from |
| | about Glu-639 to about Lys-642. |
| EF128-2 | from about Ser-236 to about Tyr-239, from about Asp-350 to |
| | about Gly-352, from about Lys-415 to about Asn-418, from |
| | about Arg-446 to about Asp-448, from about Asn-489 to |
| | about Lys-491, from about Ser-516 to about Asp-518, from |
| | about Glu-639 to about Lys-642. |
| EF129-2 | from about Asn-300 to about Gly-302, from about Ser-316 to |
| | about Gly-319, from about Asn-385 to about His-387 |
| EF131-2 | from about Lys-201 to about Tyr-204, from about Glu-263 to |
| | about Ser-266. |
| EF132-2 | from about Thr-26 to about Ser-28. |

The application's sequence listing, which the Patent Office published only in electronic form, follows.

SEQUENCE LISTING (497 sequences)

SEQ ID NO: 1 - DNA, 1347 bp; double-stranded, linear
tgaaagaatattgccagaacgtggcgagcaaattgttttataaatttttttaagggagagaaaaaaatgaagttcaaaactctagcaacaacagtgttagcaaccgcagctattttcgcattgggggcttgtggtaacggtaatggggccaaagaatcaaacgatattgtgaaagaagtgaaggaagatacgacaatcactttctggcatgcaatgaatggggttcaagaagaagcgttaacaaaattaacgaaagacttcatgaaagaaaatccaaaaattaaagtggaattacaaaatcaatctgcttaccctgatttacaagccaaaatcaattcgactttaacttcaccaaaagatttaccaacaattacgcaagcgtacccaggctggttatggaatgctgcacaagatgaaatgttagtggacttaaaaccatatatggatgatgacacaatcggctggaaagatgcagagccaattcgtgaagtattgttagacggcgccaaaatcgacggcaaacaatacggcattccatttaataaatcgacagaaatgttattctataatgctgatttgttgaaagaatatggtgttgaagtaccgaaaacattagaggaattaaaagaagcttctaaaacaatttacgaaaaatccaacaaagaagtcgttggtgctggttttgactcgttaaataactattacgcaattggaatgaaaaacaaaggcgttgattttaataaagacttagatttaacaagcaaagattcacaagaagtcgtggactattaccgtgatggtatcgaagcaggttacttccgcacagctggttcagataaatatttatctggcccatttgcaaacaaaaaggtagcaatgtttgtcggtagtattgctggtgctggttttgttcaaaaagatgctgaagctggtggctatgaatacggtgttgcaccacgtcctgaaaaaatcaacttacaacaaggaacagatatttatatgttcgatagtgctacgccagaacaacggacagcggcatttgaattcatgaaattcttagctactcctgattcacaattgtactgggcacaacaaacaggttatatgccaattttagaatctgttttacacagtgatgagtacaaaaattctaagacaaccaaagtacctgcacaacttgaaaacgcagtaaaagatttattcgctatcccagtagaagaaaatgctgattcagcctataatgaaatgcggacaattatggaaagtatttttgcttcatcaaataaagacacgagaaaattattgaaagatgcaacatcacaatttgaacaagcatggaaccaataa

SEQ ID NO: 2 - protein, 426 aa
MKFKTLATTVLATAAIFALGACGNGNGAKESNDIVKEVKEDTTITFWHAMNGVQEEALTKLTKDFMKENPKIKVELQNQSAYPDLQAKINSTLTSPKDLPTITQAYPGWLWNAAQDEMLVDLKPYMDDDTIGWKDAEPIREVLLDGAKIDGKQYGIPFNKSTEMLFYNADLLKEYGVEVPKTLEELKEASKTIYEKSNKEVVGAGFDSLNNYYAIGMKNKGVDFNKDLDLTSKDSQEVVDYYRDGIEAGYFRTAGSDKYLSGPFANKKVAMFVGSIAGAGFVQKDAEAGGYEYGVAPRPEKINLQQGTDIYMFDSATPEQRTAAFEFMKFLATPDSQLYWAQQTGYMPILESVLHSDEYKNSKTTKVPAQLENAVKDLFAIPVEENADSAYNEMRTIMESIFASSNKDTRKLLKDATSQFEQAWNQ

SEQ ID NO: 3 - DNA, 1216 bp; double-stranded, linear
ttgtggtaacggtaatggggccaaagaatcaaacgatattgtgaaagaagtgaaggaagatacgacaatcactttctggcatgcaatgaatggggttcaagaagaagcgttaacaaaattaacgaaagacttcatgaaagaaaatccaaaaattaaagtggaattacaaaatcaatctgcttaccctgatttacaagccaaaatcaattcgactttaacttcaccaaaagatttaccaacaattacgcaagcgtacccaggctggttatggaatgctgcacaagatgaaatgttagtggacttaaaaccatatatggatgatgacacaatcggctggaaagatgcagagccaattcgtgaagtattgttagacggcgccaaaatcgacggcaaacaatacggcattccatttaataaatcgacagaaatgttattctataatgctgatttgttgaaagaatatggtgttgaagtaccgaaaacattagaggaattaaaagaagcttctaaaacaatttacgaaaaatccaacaaagaagtcgttggtgctggttttgactcgttaaataactattacgcaattggaatgaaaaacaaaggcgttgattttaataaagacttagatttaacaagcaaagattcacaagaagtcgtggactattaccgtgatggtatcgaagcaggttacttccgcacagctggttcagataaatatttatctggcccatttgcaaacaaaaaggtagcaatgtttgtcggtagtattgctggtgctggttttgttcaaaaagatgctgaagctggtggctatgaatacggtgttgcaccacgtcctgaaaaaatcaacttacaacaaggaacagatatttatatgttcgatagtgctacgccagaacaacggacagcggcatttgaattcatgaaattcttagctactcctgattcacaattgtactgggcacaacaaacaggttatatgccaattttagaatctgttttacacagtgatgagtacaaaaattctaagacaaccaaagtacctgcacaacttgaaaacgcagtaaaagatttattcgctatcccagtagaagaaaatgctgattcagcctataatgaaatgcggacaattatggaaagtatttttgcttcatcaaataaagacacgagaaaattattgaaagatgcaacatcacaatttgaacaagcatggaaccaa

SEQ ID NO: 4 - protein, 405 aa
CGNGNGAKESNDIVKEVKEDTTITFWHAMNGVQEEALTKLTKDFMKENPKIKVELQNQSAYPDLQAKINSTLTSPKDLPTITQAYPGWLWNAAQDEMLVDLKPYMDDDTIGWKDAEPIREVLLDGAKIDGKQYGIPFNKSTEMLFYNADLLKEYGVEVPKTLEELKEASKTIYEKSNKEVVGAGFDSLNNYYAIGMKNKGVDFNKDLDLTSKDSQEVVDYYRDGIEAGYFRTAGSDKYLSGPFANKKVAMFVGSIAGAGFVQKDAEAGGYEYGVAPRPEKINLQQGTDIYMFDSATPEQRTAAFEFMKFLATPDSQLYWAQQTGYMPILESVLHSDEYKNSKTTKVPAQLENAVKDLFAIPVEENADSAYNEMRTIMESIFASSNKDTRKLLKDATSQFEQAWNQ

SEQ ID NO: 5 - DNA, 1161 bp; double-stranded, linear
taaatagcggaggtagtacaaatgaaattttggaaaaaaggcttaacagcggcagcgctgttagcagtggcggcagtaactttaacagcatgtggtggttcaagtgaaaagaaagcaactgaaaagagtgaagatggcaaaacaaaattaacagtaactacttggaattatgacacgaccccagaatttgagaaattattcagagcttttgaagcggaaaatcctgatatcactattgaaccggtggacattgcttcagatgattatgacacaaaagtaacaacgatgctttcatcaggagatacgacggatattttaaccatgaaaaacttactttcatattctaattacgcgctacgcaatcaattggtggatttaaccgatcacgttaaagatttagatatcgaacctgccaaagcaagttacgagatgtatgaaatcgatggtaaaacctatgctcagccttaccgtacagatttctgggtattgtattacaataaaaaaatgtttgatgaagccggaattgcctatcccgataacttaacttgggatgaatatgaagcgttagcgaaaaaattatctaaaccagaagaacaagtatatggtgcctatcaacatacttggcgctcaaccgttcaagcgattgctgctgctcaaaacaatgccaatttgattgaaccaaaatacaattatatggaaacttattatgatcgcgcattgagaatgcaaaaagatcaatcacaaatggattttggaacagcaaaatcaacaaaagtaacgtatcaatcacaatttgaaaattcaaaagcggcgatgatgtacatgggtagctggtacatggggactttattaacaaacattgatgatggcaaaacaaatgtcgaatgggggattgccgaaataccacaacaagaaaaaggcaaagcaactacctttggctcaccgacaagttttgcaattaataaaaacagtaaaaaacaaaaagctgctcaaaaattcttagactttgcttcaggtaaagaaggtgcaaaacttttagcagaagtaggggtggttccttcttataaaacagatgaaattgataaaatctactttgcaagaaaaggaatgccttcagacgagtctcacaaaaagcctttaacccagatacaattaatttag

SEQ ID NO: 6 - protein, 379 aa
MKFWKKGLTAAALLAVAAVTLTACGGSSEKKATEKSEDGKTKLTVTTWNYDTTPEFEKLFRAFEAENPDITIEPVDIASDDYDTKVTTMLSSGDTTDILTMKNLLSYSNYALRNQLVDLTDHVKDLDIEPAKASYEMYEIDGKTYAQPYRTDFWVLYYNKKMFDEAGIAYPDNLTWDEYEALAKKLSKPEEQVYGAYQHTWRSTVQAIAAAQNNANLIEPKYNYMETYYDRALRMQKDQSQMDFGTAKSTKVTYQSQFENSKAAMMYMGSWYMGTLLTNIDDGKTNVEWGIAEIPQQEKGKATTFGSPTSFAINKNSKKQKAAQKFLDFASGKEGAKLLAEVGVVPSYKTDEIDKIYFARKGMPSDESHKKPLTQIQLI

SEQ ID NO: 7 - DNA, 1069 bp; double-stranded, linear
atgtggtggttcaagtgaaaagaaagcaactgaaaagagtgaagatggcaaaacaaaattaacagtaactacttggaattatgacacgaccccagaatttgagaaattattcagagcttttgaagcggaaaatcctgatatcactattgaaccggtggacattgcttcagatgattatgacacaaaagtaacaacgatgctttcatcaggagatacgacggatattttaaccatgaaaaacttactttcatattctaattacgcgctacgcaatcaattggtggatttaaccgatcacgttaaagatttagatatcgaacctgccaaagcaagttacgagatgtatgaaatcgatggtaaaacctatgctcagccttaccgtacagatttctgggtattgtattacaataaaaaaatgtttgatgaagccggaattgcctatcccgataacttaacttgggatgaatatgaagcgttagcgaaaaaattatctaaaccagaagaacaagtatatggtgcctatcaacatacttggcgctcaaccgttcaagcgattgctgctgctcaaaacaatgccaatttgattgaaccaaaatacaattatatggaaacttattatgatcgcgcattgagaatgcaaaaagatcaatcacaaatggattttggaacagcaaaatcaacaaaagtaacgtatcaatcacaatttgaaaattcaaaagcggcgatgatgtacatgggtagctggtacatggggactttattaacaaacattgatgatggcaaaacaaatgtcgaatgggggattgccgaaataccacaacaagaaaaaggcaaagcaactacctttggctcaccgacaagttttgcaattaataaaaacagtaaaaaacaaaaagctgctcaaaaattcttagactttgcttcaggtaaagaaggtgcaaaacttttagcagaagtaggggtggttccttcttataaaacagatgaaattgataaaatctactttgcaagaaaaggaatgccttcagacgagtctcacaaaaagcctttaacccagatacaattaatt

SEQ ID NO: 8 - protein, 356 aa
CGGSSEKKATEKSEDGKTKLTVTTWNYDTTPEFEKLFRAFEAENPDITIEPVDIASDDYDTKVTTMLSSGDTTDILTMKNLLSYSNYALRNQLVDLTDHVKDLDIEPAKASYEMYEIDGKTYAQPYRTDFWVLYYNKKMFDEAGIAYPDNLTWDEYEALAKKLSKPEEQVYGAYQHTWRSTVQAIAAAQNNANLIEPKYNYMETYYDRALRMQKDQSQMDFGTAKSTKVTYQSQFENSKAAMMYMGSWYMGTLLTNIDDGKTNVEWGIAEIPQQEKGKATTFGSPTSFAINKNSKKQKAAQKFLDFASGKEGAKLLAEVGVVPSYKTDEIDKIYFARKGMPSDESHKKPLTQIQLI

SEQ ID NO: 9 - DNA, 834 bp; double-stranded, linear
taggaggacaaaagaatgaagaagttttatttagcnacattcgctgttattgcaacagttattttagctgcctgtgggggaaataaacaagcagaccagaaagaagacaaggagattaccgttgccgtgcaattggaatcttcaaaagatatcttggagattgccaagaaagaagctgagaaaaaagggtacaaaattaacattatggaagtgagcgacaatgttgcctacaacgatgccgtgcaacatgacgaagcggatgctaattttgcgcaacatcaacccttcatggaaatgtttaacaaagagaaaaaagctgatttagtggctgtgcaaccgatttattattttgctggtggtttctattcaaaagaataccaagatgcgaaagatttacctgaaaatgccaaagtggggattcctagcgatccaaccaatgaaggtcgtgctttagcaattttaaatgcaaacggcgtgattaaattaaaagaaggtgtcggctttaacggcacggtggcagatgtcgtggaaaatcctaaaaacatcacttttgaaagcattgatttactgaatttagctaaagcctatgatgaaaaagacatcgctatggtgttctgctacccagcctacttagaacctgctggtttaacaacgaaagatgcgatcttgttagaagataaagaagcaagtaaacattacgcattgcaagttgtgacacgcaaaggcgaaaaagatagcgaaaaaatcaaggttttaaaagaagcgatgacaacaaaagaagttgctgaatacatcaagaaaaattctaaaggcgccaatattcctgcgttttaa

SEQ ID NO: 10 - protein, 272 aa
MKKFYLATFAVIATVILAACGGNKQADQKEDKEITVAVQLESSKDILEIAKKEAEKKGYKINIMEVSDNVAYNDAVQHDEADANFAQHQPFMEMFNKEKKADLVAVQPIYYFAGGFYSKEYQDAKDLPENAKVGIPSDPTNEGRALAILNANGVIKLKEGVGFNGTVADVVENPKNITFESIDLLNLAKAYDEKDIAMVFCYPAYLEPAGLTTKDAILLEDKEASKHYALQVVTRKGEKDSEKIKVLKEAMTTKEVAEYIKKNSKGANIPAF

SEQ ID NO: 11 - DNA, 760 bp; double-stranded, linear
ctgtgggggaaataaacaagcagaccagaaagaagacaaggagattaccgttgccgtgcaattggaatcttcaaaagatatcttggagattgccaagaaagaagctgagaaaaaagggtacaaaattaacattatggaagtgagcgacaatgttgcctacaacgatgccgtgcaacatgacgaagcggatgctaattttgcgcaacatcaacccttcatggaaatgtttaacaaagagaaaaaagctgatttagtggctgtgcaaccgatttattattttgctggtggtttctattcaaaagaataccaagatgcgaaagatttacctgaaaatgccaaagtggggattcctagcgatccaaccaatgaaggtcgtgctttagcaattttaaatgcaaacggcgtgattaaattaaaagaaggtgtcggctttaacggcacggtggcagatgtcgtggaaaatcctaaaaacatcacttttgaaagcattgatttactgaatttagctaaagcctatgatgaaaaagacatcgctatggtgttctgctacccagcctacttagaacctgctggtttaacaacgaaagatgcgatcttgttagaagataaagaagcaagtaaacattacgcattgcaagttgtgacacgcaaaggcgaaaaagatagcgaaaaaatcaaggttttaaaagaagcgatgacaacaaaagaagttgctgaatacatcaagaaaaattctaaaggcgccaatattcctgcgttt

SEQ ID NO: 12 - protein, 253 aa
CGGNKQADQKEDKEITVAVQLESSKDILEIAKKEAEKKGYKINIMEVSDNVAYNDAVQHDEADANFAQHQPFMEMFNKEKKADLVAVQPIYYFAGGFYSKEYQDAKDLPENAKVGIPSDPTNEGRALAILNANGVIKLKEGVGFNGTVADVVENPKNITFESIDLLNLAKAYDEKDIAMVFCYPAYLEPAGLTTKDAILLEDKEASKHYALQVVTRKGEKDSEKIKVLKEAMTTKEVAEYIKKNSKGANIPAF

SEQ ID NO: 13 - DNA, 555 bp; double-stranded, linear
taaatcgaaagaaggatgatagaaatgaaaaaaatgattaaatttgcaggcattgctcttatttttgcagctcttctctctgcctgtagcaacgcaaaaaataatacacaaaagaaagccgaaactgctgcccagtcaagcactattgaagcttcagacagtaacgaaaacgagcctaatacagaaaacataacccaagcagttaaacagttagaagaaaaatttaactctgacgagaaattagtaaaaatagatgttaaaaataatgttaaagatgacacatcagataaccctcacgctgtcattacggttaaggtaattaatgatgaagcaaaaaaaaatatggaagaaatgcagactgcgatagattccaactcaggtacagaggcacaaaagactgccatatacggaattcaattaaatgttgaagaagtagccaaaacattagaaaatgataacgatgttatttctttcatcacaccttacacgaatgggaacgacagaaccatagcaaaatcaactaaaaatgaaaatattattccgttagtaaaataa

SEQ ID NO: 14 - protein, 176 aa
MKKMIKFAGIALIFAALLSACSNAKNNTQKKAETAAQSSTIEASDSNENEPNTENITQAVKQLEEKFNSDEKLVKIDVKNNVKDDTSDNPHAVITVKVINDEAKKNMEEMQTAIDSNSGTEAQKTAIYGIQLNVEEVAKTLENDNDVISFITPYTNGNDRTIAKSTKNENIIPLVK

SEQ ID NO: 15 - DNA, 469 bp; double-stranded, linear
ctgtagcaacgcaaaaaataatacacaaaagaaagccgaaactgctgcccagtcaagcactattgaagcttcagacagtaacgaaaacgagcctaatacagaaaacataacccaagcagttaaacagttagaagaaaaatttaactctgacgagaaattagtaaaaatagatgttaaaaataatgttaaagatgacacatcagataaccctcacgctgtcattacggttaaggtaattaatgatgaagcaaaaaaaaatatggaagaaatgcagactgcgatagattccaactcaggtacagaggcacaaaagactgccatatacggaattcaattaaatgttgaagaagtagccaaaacattagaaaatgataacgatgttatttctttcatcacaccttacacgaatgggaacgacagaaccatagcaaaatcaactaaaaatgaaaatattattccgttagtaaaa

SEQ ID NO: 16 - protein, 156 aa
CSNAKNNTQKKAETAAQSSTIEASDSNENEPNTENITQAVKQLEEKFNSDEKLVKIDVKNNVKDDTSDNPHAVITVKVINDEAKKNMEEMQTAIDSNSGTEAQKTAIYGIQLNVEEVAKTLENDNDVISFITPYTNGNDRTIAKSTKNENIIPLVK

SEQ ID NO: 17 - DNA, 825 bp; double-stranded, linear
taaaaaatgaaaaaacgattgacgattgtggggatgctttttctggccattttagtaatggttggttgtggtaaaaatcagcaagcaacgacaaaagaaaaagagacaaaacctgaagaactaactctttacattgtgcgccacggaaaaaccatgttaaatacgacggaccgcgtacaaggatggtcagatgcggtcctaacaccagaaggtgaaaaagttgtgacagcaactgggattggactgaaagatgttgcctttcaaaatgcatatagtagtgatagtggccgcgccttgcaaactgctcaacttattttagatcaaaataaagcaggcaaagaccttgaagtcgtgcgtgacccagatttacgtgaatttaattttggtagctatgaaggggatttaaataagacaatgtggcaggatattgctgatgatcaaggtgtttccttagaagaatttatgaaaaacatgactcctgaatcctttgccaatagtgtagctaaactggatcaacagcgcgaggaaagcaagaataactggcctgcagaagactatgctacaattactaaacgtttgaaaaaaggcttagataaaattgttgccacagaatcagccaattctgggaatggcaatgttttagtggtctctcatggcttgagtatttcagcgttgttagcaactttatttgatgattttaaagtcccagaaggcggtttgaagaatgctagtgtcacaacaattcattacaaaaatggcgaatatactttggataaagtcaatgatgtcagctacttagaagcaggcgaaaaagaatcaaaataa

SEQ ID NO: 18 - protein, 272 aa
MKKRLTIVGMLFLAILVMVGCGKNQQATTKEKETKPEELTLYIVRHGKTMLNTTDRVQGWSDAVLTPEGEKVVTATGIGLKDVAFQNAYSSDSGRALQTAQLILDQNKAGKDLEVVRDPDLREFNFGSYEGDLNKTMWQDIADDQGVSLEEFMKNMTPESFANSVAKLDQQREESKNNWPAEDYATITKRLKKGLDKIVATESANSGNGNVLVVSHGLSISALLATLFDDFKVPEGGLKNASVTTIHYKNGEYTLDKVNDVSYLEAGEKESK

SEQ ID NO: 19 - DNA, 757 bp; double-stranded, linear
ttgtggtaaaaatcagcaagcaacgacaaaagaaaaagagacaaaacctgaagaactaactctttacattgtgcgccacggaaaaaccatgttaaatacgacggaccgcgtacaaggatggtcagatgcggtcctaacaccagaaggtgaaaaagttgtgacagcaactgggattggactgaaagatgttgcctttcaaaatgcatatagtagtgatagtggccgcgccttgcaaactgctcaacttattttagatcaaaataaagcaggcaaagaccttgaagtcgtgcgtgacccagatttacgtgaatttaattttggtagctatgaaggggatttaaataagacaatgtggcaggatattgctgatgatcaaggtgtttccttagaagaatttatgaaaaacatgactcctgaatcctttgccaatagtgtagctaaactggatcaacagcgcgaggaaagcaagaataactggcctgcagaagactatgctacaattactaaacgtttgaaaaaaggcttagataaaattgttgccacagaatcagccaattctgggaatggcaatgttttagtggtctctcatggcttgagtatttcagcgttgttagcaactttatttgatgattttaaagtcccagaaggcggtttgaagaatgctagtgtcacaacaattcattacaaaaatggcgaatatactttggataaagtcaatgatgtcagctacttagaagcaggcgaaaaagaatcaaaa

SEQ ID NO: 20 - protein, 252 aa
CGKNQQATTKEKETKPEELTLYIVRHGKTMLNTTDRVQGWSDAVLTPEGEKVVTATGIGLKDVAFQNAYSSDSGRALQTAQLILDQNKAGKDLEVVRDPDLREFNFGSYEGDLNKTMWQDIADDQGVSLEEFMKNMTPESFANSVAKLDQQREESKNNWPAEDYATITKRLKKGLDKIVATESANSGNGNVLVVSHGLSISALLATLFDDFKVPEGGLKNASVTTIHYKNGEYTLDKVNDVSYLEAGEKESK

SEQ ID NO: 21 - DNA, 843 bp; double-stranded, linear
taaacgataaatggagggaataagatgaaaaaacgtacattatggtcagtaattactgtagcagtagctgtcttagttttaggggcttgcggcaataaaaagagtgatgactcggtcttgaaagttggagcttcaccagttccacatgcagagattttagaacatgtaaaacctttattagaaaaagaaggcgtaaaattagaagtgacgacttatacagattacgtgctacctaacaaggcgttggaaagtggcgatatcgatgccaactatttccaacatgtgccgttctttaatgaagcggttaaagaaaatgattatgactttgtgaatgcaggtgcgattcatttagaaccagttgggctttactcgaaaaaatacaaatcgttacaagaaattcctgatggttcaacgatttacgttagctcttccgtttcagattggccacgcgtattaactatcttagaagatgctggtttaatcacgctgaaagaaggggtagaccggacaactgctactttcgatgatattgataaaaatactaaaaagttgaaattcaatcatgaaagtgatccagcaatcatgaccactctttatgacaatgaagaaggggctgcggttttaattaactcaaactttgccgtggatcaaggattaaatccgaaaaaagatgcgattgccttagaaaaagaaagttcaccttatgccaatattattgcggttcgtaaagaagacgaaaacaacgaaaatgtaaaaaaattagtcaaagtgttacgtagcaaagaagtccaagattggattacgaaaaaatggaacggcgctattgttccagtcaatgaataa

SEQ ID NO: 22 - protein, 272 aa
MKKRTLWSVITVAVAVLVLGACGNKKSDDSVLKVGASPVPHAEILEHVKPLLEKEGVKLEVTTYTDYVLPNKALESGDIDANYFQHVPFFNEAVKENDYDFVNAGAIHLEPVGLYSKKYKSLQEIPDGSTIYVSSSVSDWPRVLTILEDAGLITLKEGVDRTTATFDDIDKNTKKLKFNHESDPAIMTTLYDNEEGAAVLINSNFAVDQGLNPKKDAIALEKESSPYANIIAVRKEDENNENVKKLVKVLRSKEVQDWITKKWNGAIVPVNE

SEQ ID NO: 23 - DNA, 754 bp; double-stranded, linear
ttgcggcaataaaaagagtgatgactcggtcttgaaagttggagcttcaccagttccacatgcagagattttagaacatgtaaaacctttattagaaaaagaaggcgtaaaattagaagtgacgacttatacagattacgtgctacctaacaaggcgttggaaagtggcgatatcgatgccaactatttccaacatgtgccgttctttaatgaagcggttaaagaaaatgattatgactttgtgaatgcaggtgcgattcatttagaaccagttgggctttactcgaaaaaatacaaatcgttacaagaaattcctgatggttcaacgatttacgttagctcttccgtttcagattggccacgcgtattaactatcttagaagatgctggtttaatcacgctgaaagaaggggtagaccggacaactgctactttcgatgatattgataaaaatactaaaaagttgaaattcaatcatgaaagtgatccagcaatcatgaccactctttatgacaatgaagaaggggctgcggttttaattaactcaaactttgccgtggatcaaggattaaatccgaaaaaagatgcgattgccttagaaaaagaaagttcaccttatgccaatattattgcggttcgtaaagaagacgaaaacaacgaaaatgtaaaaaaattagtcaaagtgttacgtagcaaagaagtccaagattggattacgaaaaaatggaacggcgctattgttccagtcaatgaa

SEQ ID NO: 24 - protein, 251 aa
CGNKKSDDSVLKVGASPVPHAEILEHVKPLLEKEGVKLEVTTYTDYVLPNKALESGDIDANYFQHVPFFNEAVKENDYDFVNAGAIHLEPVGLYSKKYKSLQEIPDGSTIYVSSSVSDWPRVLTILEDAGLITLKEGVDRTTATFDDIDKNTKKLKFNHESDPAIMTTLYDNEEGAAVLINSNFAVDQGLNPKKDAIALEKESSPYANIIAVRKEDENNENVKKLVKVLRSKEVQDWITKKWNGAIVPVNE

SEQ ID NO: 25 - DNA, 960 bp; double-stranded, linear
taaaccgtgagaaagaaatggaggaatcaacgaatgaaaaaatttagtttattttttttaacacttttagcagggttaacgttagctgcttgcgggaatcaagccgctgaaaagaaagaaaaattagcaattgtgacaacgaactcgatcctatctgatttagtgaaaaatgttgggcaagacaaaattgagctgcatagtattgtgccaattgggacagaccctcacgaatatgaaccgttaccagaagacattgcgaaagcttctgaagcggacattttattctttaacggcttgaacttagaaacaggcggaaatggctggtttaacaaattaatgaaaacggccaaaaaagttgagaataaagattacttttctacaagcaaaaatgttacgccacaatatttaacaagtgccggtcaagaacaaacagaagatccacatgcttggttagacattgaaaatggcattaaatatgtagaaaacattcgtgacgtgttagtagaaaaagatccaaaaaataaagatttctatacagaaaacgcgaaaaattataccgaaaaacttagcaaactacatgaggaagccaaagctaaatttgctgatattcctgatgataaaaaattattagttacaagtgaaggtgcctttaaatatttctccaaagcttatgatttaaatgccgcttatatttgggaaattaacacagaaagtcaaggnacacctgaacaaatgaccacgattattgataccattaagaaatcaaaagcacctgtgttatttgttgaaaccagtgtcgataaacgtagtatggaacgggtctcaaaagaagtgaaacgaccaatttacgatacacttttcacagactctcttgccaaagaaggaacagaaggcgatacgtactacagcatgatgaactggaatttaacaaaaatccatgatggcttaatgagtaaataa

SEQ ID NO: 26 - protein, 308 aa
MKKFSLFFLTLLAGLTLAACGNQAAEKKEKLAIVTTNSILSDLVKNVGQDKIELHSIVPIGTDPHEYEPLPEDIAKASEADILFFNGLNLETGGNGWFNKLMKTAKKVENKDYFSTSKNVTPQYLTSAGQEQTEDPHAWLDIENGIKYVENIRDVLVEKDPKNKDFYTENAKNYTEKLSKLHEEAKAKFADIPDDKKLLVTSEGAFKYFSKAYDLNAAYIWEINTESQGTPEQMTTIIDTIKKSKAPVLFVETSVDKRSMERVSKEVKRPIYDTLFTDSLAKEGTEGDTYYSMMNWNLTKIHDGLMSK

SEQ ID NO: 27 - DNA, 868 bp; double-stranded, linear
ttgcgggaatcaagccgctgaaaagaaagaaaaattagcaattgtgacaacgaactcgatcctatctgatttagtgaaaaatgttgggcaagacaaaattgagctgcatagtattgtgccaattgggacagaccctcacgaatatgaaccgttaccagaagacattgcgaaagcttctgaagcggacattttattctttaacggcttgaacttagaaacaggcggaaatggctggtttaacaaattaatgaaaacggccaaaaaagttgagaataaagattacttttctacaagcaaaaatgttacgccacaatatttaacaagtgccggtcaagaacaaacagaagatccacatgcttggttagacattgaaaatggcattaaatatgtagaaaacattcgtgacgtgttagtagaaaaagatccaaaaaataaagatttctatacagaaaacgcgaaaaattataccgaaaaacttagcaaactacatgaggaagccaaagctaaatttgctgatattcctgatgataaaaaattattagttacaagtgaaggtgcctttaaatatttctccaaagcttatgatttaaatgccgcttatatttgggaaattaacacagaaagtcaaggnacacctgaacaaatgaccacgattattgataccattaagaaatcaaaagcacctgtgttatttgttgaaaccagtgtcgataaacgtagtatggaacgggtctcaaaagaagtgaaacgaccaatttacgatacacttttcacagactctcttgccaaagaaggaacagaaggcgatacgtactacagcatgatgaactggaatttaacaaaaatccatgatggcttaatgagtaaa

SEQ ID NO: 28 - protein, 289 aa
CGNQAAEKKEKLAIVTTNSILSDLVKNVGQDKIELHSIVPIGTDPHEYEPLPEDIAKASEADILFFNGLNLETGGNGWFNKLMKTAKKVENKDYFSTSKNVTPQYLTSAGQEQTEDPHAWLDIENGIKYVENIRDVLVEKDPKNKDFYTENAKNYTEKLSKLHEEAKAKFADIPDDKKLLVTSEGAFKYFSKAYDLNAAYIWEINTESQGTPEQMTTIIDTIKKSKAPVLFVETSVDKRSMERVSKEVKRPIYDTLFTDSLAKEGTEGDTYYSMMNWNLTKIHDGLMSK

SEQ ID NO: 29 - DNA, 840 bp; double-stranded, linear
tgacaaatgaaaaaatttagtaaattaattggacttattggggtattagcttttacgattgcaggttgtgcatcggggtctgtgaaggatactaagacagaaaccgttaaactaggggttgtaggaacaaaaaatgatgaatgggaatcggtcaaagaccgtttgaaaaagaaaaatattgatttacaattggtagaatttacagactatacgcaaccaaacgcagcattagcagaaaaagaaattgatttaaatgcctttcagcatcaaatctttttagacaattacaataaagagcatggaacgaaattagtatcaattggcaatacagtcaatgcaccattgggaatttacgctaataaattgaaagatatcacgaaaattaaagacggcggagaaattgctattcctaatgacccaacgaatggcgggcgggcgttaattttattacaaactgcaggactgataaaagtagatcctgcgaaacagcaactaccgactgtcagtgatattactgaaaataaacgccaattgaaaataactgaattagatgctacgcaaacagcgcgcgctttacaagatgtcgatgcttcagtgattaatagcggcatggctgtcgatgctgggtatacaccagataaagatgctattttcttagaacctgtaaacgaaaaagcgaaaccttatgtgaacattgtcgtggcccgagaagaagatcaagagaataaactttatcaaaaagttgtagaagaatatcaacaagaagaaacgaaaaaggtcattgcagaaacatcaaaaggcgccaatgttccagcctgggaaacatttggtaaaaaataa

SEQ ID NO: 30 - protein, 277 aa
MKKFSKLIGLIGVLAFTIAGCASGSVKDTKTETVKLGVVGTKNDEWESVKDRLKKKNIDLQLVEFTDYTQPNAALAEKEIDLNAFQHQIFLDNYNKEHGTKLVSIGNTVNAPLGIYANKLKDITKIKDGGEIAIPNDPTNGGRALILLQTAGLIKVDPAKQQLPTVSDITENKRQLKITELDATQTARALQDVDASVINSGMAVDAGYTPDKDAIFLEPVNEKAKPYVNIVVAREEDQENKLYQKVVEEYQQEETKKVIAETSKGANVPAWETFGKK

SEQ ID NO: 31 - DNA, 772 bp; double-stranded, linear
ttgtgcatcggggtctgtgaaggatactaagacagaaaccgttaaactaggggttgtaggaacaaaaaatgatgaatgggaatcggtcaaagaccgtttgaaaaagaaaaatattgatttacaattggtagaatttacagactatacgcaaccaaacgcagcattagcagaaaaagaaattgatttaaatgcctttcagcatcaaatctttttagacaattacaataaagagcatggaacgaaattagtatcaattggcaatacagtcaatgcaccattgggaatttacgctaataaattgaaagatatcacgaaaattaaagacggcggagaaattgctattcctaatgacccaacgaatggcgggcgggcgttaattttattacaaactgcaggactgataaaagtagatcctgcgaaacagcaactaccgactgtcagtgatattactgaaaataaacgccaattgaaaataactgaattagatgctacgcaaacagcgcgcgctttacaagatgtcgatgcttcagtgattaatagcggcatggctgtcgatgctgggtatacaccagataaagatgctattttcttagaacctgtaaacgaaaaagcgaaaccttatgtgaacattgtcgtggcccgagaagaagatcaagagaataaactttatcaaaaagttgtagaagaatatcaacaagaagaaacgaaaaaggtcattgcagaaacatcaaaaggcgccaatgttccagcctgggaaacatttggtaaaaaa

SEQ ID NO: 32 - protein, 257 aa
CASGSVKDTKTETVKLGVVGTKNDEWESVKDRLKKKNIDLQLVEFTDYTQPNAALAEKEIDLNAFQHQIFLDNYNKEHGTKLVSIGNTVNAPLGIYANKLKDITKIKDGGEIAIPNDPTNGGRALILLQTAGLIKVDPAKQQLPTVSDITENKRQLKITELDATQTARALQDVDASVINSGMAVDAGYTPDKDAIFLEPVNEKAKPYVNIVVAREEDQENKLYQKVVEEYQQEETKKVIAETSKGANVPAWETFGKK

SEQ ID NO: 33 - DNA, 1500 bp; double-stranded, linear
tgaaagaataaaattgtacaggaggaaataaggaatgaaaaaatggcaaaaaggattagccgtagctggcgcacagctttagctgtaggactaagcgcgtgcggtaaatcttcaaaagatgcagcgtcaaaaggtgatgatagtacaccaacgttattaatgtatcgtgttggggacaaaccagataattatgaccaattaatcgataatgcgaataaaattatcgagaaaaaaattggggcaaaattaaaaatggaatttgttggttggggcgattgggaccaaaaaatgtcaacaatcgttgcttctggtgaaagctatgatatttcattagcacaaaattatgcaacgaatgcacaaaaaggcgcctatgctgatttaactgatttagcacctaaatatgccaaagaagcctatgatcaattgccagataactatattaaaggaaatacgattaatggaaaactgtatgcgttcccaattttaggtaactcttacggtcaacaagttttaacttttaataaagaatatgtcgataaatacaatttagatattagtaaagtcgatggtagttatgaaagtgcaacggaagttctaaaagaattccntaaaaanganccaaatattgctgcttttgctatcggccaaacattctttgcaacaggtaattatgacttccctattggtaaccaatatccatttgcagtaaaaacaactgatactggctcaccaaaaattattaaccaatatgccgacaaagacatgattaataacttaaaagtcttgcatcaatggtataaagatggcttgattccaacagatgctgctacaagtacaacaccatatgacttaaataccaatacttggtttatgcgtcaagaaacacaaggacctatggattatggtgatacaatcttaacacaagctgctggcaaaccacttgtttctcgtccactaacagaaccattaaaaacaacagctcaagcgcaaatggctaactatgttgttgcaaacacgtctaaaaacaaagaaaaatctgttgaattgttaggtttattaaacagcaatccagaattgttaaacggacttgtttatggtgaagaaggcaaacaatatgaaaaagttggcgatgatcgtgtgaaattgttgaaagattacacaccaacaactcatttgagtgcttggaacacaggaaacaacttaatcatttggccagaagaatctgtcactgaagaaatggttaaagaacgtgataagagcatcgaagaagcaaaagattcaccaattcttggttttacttttgtaaatgataaagtgaaaactgaaatcactaacgttgctacagttatgaaccgttacgcagcaagcttaaatacaggaactgttgatccagaagaaacacttccaaaattaatggatgacctaaaaacagctggctgggataaagttcaaaaagaaatgcaaacacaattagacgaatatatccaatctcaaaaataa

SEQ ID NO: 34 - protein, 485 aa
MAKRISRSWRTALAVGLSACGKSSKDAASKGDDSTPTLLMYRVGDKPDNYDQLIDNANKIIEKKIGAKLKMEFVGWGDWDQKMSTIVASGESYDISLAQNYATNAQKGAYADLTDLAPKYAKEAYDQLPDNYIKGNTINGKLYAFPILGNSYGQQVLTFNKEYVDKYNLDISKVDGSYESATEVLKEFXKXXPNIAAFAIGQTFFATGNYDFPIGNQYPFAVKTTDTGSPKIINQYADKDMINNLKVLHQWYKDGLIPTDAATSTTPYDLNTNTWFMRQETQGPMDYGDTILTQAAGKPLVSRPLTEPLKTTAQAQMANYVVANTSKNKEKSVELLGLLNSNPELLNGLVYGEEGKQYEKVGDDRVKLLKDYTPTTHLSAWNTGNNLIIWPEESVTEEMVKERDKSIEEAKDSPILGFTFVNDKVKTEITNVATVMNRYAASLNTGTVDPEETLPKLMDDLKTAGWDKVQKEMQTQLDEYIQSQK

SEQ ID NO: 35 - DNA, 1399 bp; double-stranded, linear
gtgcggtaaatcttcaaaagatgcagcgtcaaaaggtgatgatagtacaccaacgttattaatgtatcgtgttggggacaaaccagataattatgaccaattaatcgataatgcgaataaaattatcgagaaaaaaattggggcaaaattaaaaatggaatttgttggttggggcgattgggaccaaaaaatgtcaacaatcgttgcttctggtgaaagctatgatatttcattagcacaaaattatgcaacgaatgcacaaaaaggcgcctatgctgatttaactgatttagcacctaaatatgccaaagaagcctatgatcaattgccagataactatattaaaggaaatacgattaatggaaaactgtatgcgttcccaattttaggtaactcttacggtcaacaagttttaacttttaataaagaatatgtcgataaatacaatttagatattagtaaagtcgatggtagttatgaaagtgcaacggaagttctaaaagaattccntaaaaanganccaaatattgctgcttttgctatcggccaaacattctttgcaacaggtaattatgacttccctattggtaaccaatatccatttgcagtaaaaacaactgatactggctcaccaaaaattattaaccaatatgccgacaaagacatgattaataacttaaaagtcttgcatcaatggtataaagatggcttgattccaacagatgctgctacaagtacaacaccatatgacttaaataccaatacttggtttatgcgtcaagaaacacaaggacctatggattatggtgatacaatcttaacacaagctgctggcaaaccacttgtttctcgtccactaacagaaccattaaaaacaacagctcaagcgcaaatggctaactatgttgttgcaaacacgtctaaaaacaaagaaaaatctgttgaattgttaggtttattaaacagcaatccagaattgttaaacggacttgtttatggtgaagaaggcaaacaatatgaaaaagttggcgatgatcgtgtgaaattgttgaaagattacacaccaacaactcatttgagtgcttggaacacaggaaacaacttaatcatttggccagaagaatctgtcactgaagaaatggttaaagaacgtgataagagcatcgaagaagcaaaagattcaccaattcttggttttacttttgtaaatgataaagtgaaaactgaaatcactaacgttgctacagttatgaaccgttacgcagcaagcttaaatacaggaactgttgatccagaagaaacacttccaaaattaatggatgacctaaaaacagctggctgggataaagttcaaaaagaaatgcaaacacaattagacgaatatatccaatctcaaaaa

SEQ ID NO: 36 - protein, 466 aa
CGKSSKDAASKGDDSTPTLLMYRVGDKPDNYDQLIDNANKIIEKKIGAKLKMEFVGWGDWDQKMSTIVASGESYDISLAQNYATNAQKGAYADLTDLAPKYAKEAYDQLPDNYIKGNTINGKLYAFPILGNSYGQQVLTFNKEYVDKYNLDISKVDGSYESATEVLKEFXKXXPNIAAFAIGQTFFATGNYDFPIGNQYPFAVKTTDTGSPKIINQYADKDMINNLKVLHQWYKDGLIPTDAATSTTPYDLNTNTWFMRQETQGPMDYGDTILTQAAGKPLVSRPLTEPLKTTAQAQMANYVVANTSKNKEKSVELLGLLNSNPELLNGLVYGEEGKQYEKVGDDRVKLLKDYTPTTHLSAWNTGNNLIIWPEESVTEEMVKERDKSIEEAKDSPILGFTFVNDKVKTEITNVATVMNRYAASLNTGTVDPEETLPKLMDDLKTAGWDKVQKEMQTQLDEYIQSQK

SEQ ID NO: 37 - DNA, 975 bp; double-stranded, linear
taacgtttttggaggaaaagaatgaaaaagaaatttttagcaatgatggcagtttcaatgatgggactgttaatgttaagtgcttgtcaaacaaataaaaaaacagcagattctgcaacaacagaaacaacagctaaaacggaagtcacagtcaaagacaccaatggtcaattaaccgttcccaaaaatcctaagaaagtcgttgtttttgataatggttccttggatacaatggatgcactaggtgtcggtgaccgcgtggtaggtgcgccaactaaaaatatccctgcgtatttgaaaaaataccaaaaagttgaatcagcaggcggcattaaagaaccagatttagaaaaaatcaatcaactaaaaccagacttaattattatttctggtcgtcaacaagattatcaagaacaattaaaagccattgcgccaaccatttacttagctgtagatgccaaaaatccttgggcatcaacgaaacaaaatatcgaaacgttaggcactatttttgataaagaagaggtagctaaagaaaaaataactggcttagaaaaagaaattgctgacgtgaaaaaacaagcagaagctagcgcgaataatgcgcttgttgtgttagttaacgaaggacaactttccgcttacggaaaaggctctcgtttcggtttaattcatgatacatttggcttcaaagcagcagacgataagattgaagcttccactcatgggcaaagtgtttcttacgaatatgttttagaaaaaaatcctgggattctctttgtggtagatcgcaccaaagcaattggtggcgacgattcaaaagataacgtcgctgcaaacgaattgattcaaaaaaccgatgctggtaaaaatgataaagtcattatgcttcaaccagatgtttggtatctaagcggtggtggattagaatcaatgcatttgatgatagaagatgttaaaaaaggattagagtaa

SEQ ID NO: 38 - protein, 317 aa
MKKKFLAMMAVSMMGLLMLSACQTNKKTADSATTETTAKTEVTVKDTNGQLTVPKNPKKVVVFDNGSLDTMDALGVGDRVVGAPTKNIPAYLKKYQKVESAGGIKEPDLEKINQLKPDLIIISGRQQDYQEQLKAIAPTIYLAVDAKNPWASTKQNIETLGTIFDKEEVAKEKITGLEKEIADVKKQAEASANNALVVLVNEGQLSAYGKGSRFGLIHDTFGFKAADDKIEASTHGQSVSYEYVLEKNPGILFVVDRTKAIGGDDSKDNVAANELIQKTDAGKNDKVIMLQPDVWYLSGGGLESMHLMIEDVKKGLE

SEQ ID NO: 39 - DNA, 889 bp; double-stranded, linear
ttgtcaaacaaataaaaaaacagcagattctgcaacaacagaaacaacagctaaaacggaagtcacagtcaaagacaccaatggtcaattaaccgttcccaaaaatcctaagaaagtcgttgtttttgataatggttccttggatacaatggatgcactaggtgtcggtgaccgcgtggtaggtgcgccaactaaaaatatccctgcgtatttgaaaaaataccaaaaagttgaatcagcaggcggcattaaagaaccagatttagaaaaaatcaatcaactaaaaccagacttaattattatttctggtcgtcaacaagattatcaagaacaattaaaagccattgcgccaaccatttacttagctgtagatgccaaaaatccttgggcatcaacgaaacaaaatatcgaaacgttaggcactatttttgataaagaagaggtagctaaagaaaaaataactggcttagaaaaagaaattgctgacgtgaaaaaacaagcagaagctagcgcgaataatgcgcttgttgtgttagttaacgaaggacaactttccgcttacggaaaaggctctcgtttcggtttaattcatgatacatttggcttcaaagcagcagacgataagattgaagcttccactcatgggcaaagtgtttcttacgaatatgttttagaaaaaaatcctgggattctctttgtggtagatcgcaccaaagcaattggtggcgacgattcaaaagataacgtcgctgcaaacgaattgattcaaaaaaccgatgctggtaaaaatgataaagtcattatgcttcaaccagatgtttggtatctaagcggtggtggattagaatcaatgcatttgatgatagaagatgttaaaaaaggattagag

SEQ ID NO: 40 - protein, 296 aa
CQTNKKTADSATTETTAKTEVTVKDTNGQLTVPKNPKKVVVFDNGSLDTMDALGVGDRVVGAPTKNIPAYLKKYQKVESAGGIKEPDLEKINQLKPDLIIISGRQQDYQEQLKAIAPTIYLAVDAKNPWASTKQNIETLGTIFDKEEVAKEKITGLEKEIADVKKQAEASANNALVVLVNEGQLSAYGKGSRFGLIHDTFGFKAADDKIEASTHGQSVSYEYVLEKNPGILFVVDRTKAIGGDDSKDNVAANELIQKTDAGKNDKVIMLQPDVWYLSGGGLESMHLMIEDVKKGLE

SEQ ID NO: 41 - DNA, 1659 bp; double-stranded, linear
tgagggggcaacaacatgaaattggggaaaaaagtagtaggtttgattgcaacagggtttcttttagccgcatgtggcggaaccaaagaagcggcagagaaagtagattcgggaaatttagcagctgaacaaaaaatcagtattagttcacctgcaccaatctcaacattggatacaacacaaacaacagataaaaatacctttacaatggcacaacatttatttgaaggcctttatcggtttgatgatgatagtgccacggtgccagctctagctaaagatgtcaagattagtgacgatgggcgcaagtaccactttaccttgcgggaggggattaagtggagcaacggcgagccaatcacggcccaagattttgtttattcttggaaaaaactggtgacaccagcgacgattggaccgaatgcctatttactagacagtgttaaaaatagttttgaaatacgcaacggtgaaaagtcagtcgatgaattagggatttcagccccgaatgacaaagaattcattgttgaattaaaacaggcccaaccttccttcttagcagtcgtttcgattgcttggttagcgccacaaaatcaaaaatttgtcgaagcgcaaggcaaagattacgccttggatagtgaacatttactttatagcgggccatttacgctagccaattgggatgcgacttcagatacttggacattgaaaaaaaatccagaatactatgatgcggatcaagtgaaactggaagaagttgcggttagcacaatcaaagaagataatactgggattaacttatatcaagtgaatgaactagacttagttcgcattaacggacaatatgttcaacaatatcaagatgatccaggctatgtcagtcatccagatgtggccaactacttcttagatttcaacaaaaaagaaggaacgccattagcgaatgttcatttacgaaaagcgattggccaagcaattgataaagaagccttaacacaaagtgtcttaaacgatgggtcaaaaccccttaacggattgattccaagtaaactttatgcgaatccagaaacggatgaagatttccgagcttacagtggcgaatatttgaaaaatgacgtcaaaaaagctcaagctgaatggacgaaagcccaagcggatgtcggtaaaaaagtgaaactttcattgctggcggcagacacagatcaaggaaaacgaattgctgaatatgttcaaagtcagttgcaagaaaatctgccaggtttagaaattaccatttcatcgcaaccaagtaataatgtgaaccaatcgcgacgtgaaaaaaattatgagttgtctctttcaggatggattgccggcagtagtgaattagactcttactttaacttatatgcaggagaatcaagttacaattacggcaattatcataatgccaaatacgaccaattggtagaagaggcacgaacgattaatgccaataatccagagaaacagtttgcagaatacaaagaagcggaagacatcttgttgaaccaagatgctgcccaagtaccgctgtatcaaagtgcctcaaattatctaatcaatcctaaattgaaaggcattagttatcacttgtatggggattatttccacttgcgcaatgcctatttaacagaatga

SEQ ID NO: 42 - protein, 547 aa
MKLGKKVVGLIATGFLLAACGGTKEAAEKVDSGNLAAEQKISISSPAPISTLDTTQTTDKNTFTMAQHLFEGLYRFDDDSATVPALAKDVKISDDGRKYHFTLREGIKWSNGEPITAQDFVYSWKKLVTPATIGPNAYLLDSVKNSFEIRNGEKSVDELGISAPNDKEFIVELKQAQPSFLAVVSIAWLAPQNQKFVEAQGKDYALDSEHLLYSGPFTLANWDATSDTWTLKKNPEYYDADQVKLEEVAVSTIKEDNTGINLYQVNELDLVRINGQYVQQYQDDPGYVSHPDVANYFLDFNKKEGTPLANVHLRKAIGQAIDKEALTQSVLNDGSKPLNGLIPSKLYANPETDEDFRAYSGEYLKNDVKKAQAEWTKAQADVGKKVKLSLLAADTDQGKRIAEYVQSQLQENLPGLEITISSQPSNNVNQSRREKNYELSLSGWIAGSSELDSYFNLYAGESSYNYGNYHNAKYDQLVEEARTINANNPEKQFAEYKEAEDILLNQDAAQVPLYQSASNYLINPKLKGISYHLYGDYFHLRNAYLTE

SEQ ID NO: 43 - DNA, 1585 bp; double-stranded, linear
atgtggcggaaccaaagaagcggcagagaaagtagattcgggaaatttagcagctgaacaaaaaatcagtattagttcacctgcaccaatctcaacattggatacaacacaaacaacagataaaaatacctttacaatggcacaacatttatttgaaggcctttatcggtttgatgatgatagtgccacggtgccagctctagctaaagatgtcaagattagtgacgatgggcgcaagtaccactttaccttgcgggaggggattaagtggagcaacggcgagccaatcacggcccaagattttgtttattcttggaaaaaactggtgacaccagcgacgattggaccgaatgcctatttactagacagtgttaaaaatagttttgaaatacgcaacggtgaaaagtcagtcgatgaattagggatttcagccccgaatgacaaagaattcattgttgaattaaaacaggcccaaccttccttcttagcagtcgtttcgattgcttggttagcgccacaaaatcaaaaatttgtcgaagcgcaaggcaaagattacgccttggatagtgaacatttactttatagcgggccatttacgctagccaattgggatgcgacttcagatacttggacattgaaaaaaaatccagaatactatgatgcggatcaagtgaaactggaagaagttgcggttagcacaatcaaagaagataatactgggattaacttatatcaagtgaatgaactagacttagttcgcattaacggacaatatgttcaacaatatcaagatgatccaggctatgtcagtcatccagatgtggccaactacttcttagatttcaacaaaaaagaaggaacgccattagcgaatgttcatttacgaaaagcgattggccaagcaattgataaagaagccttaacacaaagtgtcttaaacgatgggtcaaaaccccttaacggattgattccaagtaaactttatgcgaatccagaaacggatgaagatttccgagcttacagtggcgaatatttgaaaaatgacgtcaaaaaagctcaagctgaatggacgaaagcccaagcggatgtcggtaaaaaagtgaaactttcattgctggcggcagacacagatcaaggaaaacgaattgctgaatatgttcaaagtcagttgcaagaaaatctgccaggtttagaaattaccatttcatcgcaaccaagtaataatgtgaaccaatcgcgacgtgaaaaaaattatgagttgtctctttcaggatggattgccggcagtagtgaattagactcttactttaacttatatgcaggagaatcaagttacaattacggcaattatcataatgccaaatacgaccaattggtagaagaggcacgaacgattaatgccaataatccagagaaacagtttgcagaatacaaagaagcggaagacatcttgttgaaccaagatgctgcccaagtaccgctgtatcaaagtgcctcaaattatctaatcaatcctaaattgaaaggcattagttatcacttgtatggggattatttccacttgcgcaatgcctatttaacagaa

SEQ ID NO: 44 - protein, 528 aa
CGGTKEAAEKVDSGNLAAEQKISISSPAPISTLDTTQTTDKNTFTMAQHLFEGLYRFDDDSATVPALAKDVKISDDGRKYHFTLREGIKWSNGEPITAQDFVYSWKKLVTPATIGPNAYLLDSVKNSFEIRNGEKSVDELGISAPNDKEFIVELKQAQPSFLAVVSIAWLAPQNQKFVEAQGKDYALDSEHLLYSGPFTLANWDATSDTWTLKKNPEYYDADQVKLEEVAVSTIKEDNTGINLYQVNELDLVRINGQYVQQYQDDPGYVSHPDVANYFLDFNKKEGTPLANVHLRKAIGQAIDKEALTQSVLNDGSKPLNGLIPSKLYANPETDEDFRAYSGEYLKNDVKKAQAEWTKAQADVGKKVKLSLLAADTDQGKRIAEYVQSQLQENLPGLEITISSQPSNNVNQSRREKNYELSLSGWIAGSSELDSYFNLYAGESSYNYGNYHNAKYDQLVEEARTINANNPEKQFAEYKEAEDILLNQDAAQVPLYQSASNYLINPKLKGISYHLYGDYFHLRNAYLTE

SEQ ID NO: 45 - DNA, 795 bp; double-stranded, linear
taacgaaaaatgaaaaaaattgctttgttcagtatgttaacgttcagtgtattgtctttaagtctagcaggatgtggaaacaaaaaaacagcaagcacaaatgattctaagccaaagcaagaaacaaagaaagccacgcagaaatcctctagccaacaagaaatgaaaagtagtcattcgtctgtcacgggtcaaaattctaatgtgacaggggaaaatccgtcagaaaatgccacgcagccttctgcaggaactgatgaaacgaatgaagtccctcaaaaccaagcacctgatacaaacattacaattaccaatgttgttttcaatcctgaaagaaatgaaattaatggtactacattacctaatgcaaccattacagcaacggtagtcggtgatgcttctgcacaagcaggtgttttttatgcggatgccaatggcaattttacagtaattagtcccagagcgggagcgactactcaattaatcgcaaccgttgatcaacggaatagtgcacctgtccaaattgatattccaagttcaggacaagaagcagcgctttcttttagcaatattacgattgatccgaaacaagggacaatttctggtaaaacagcaccgaatgcaactattttagtgtcacgtgcagatgatgcgcgggtgattttagcaagttttactgcggatgcccaagggaatttcacagccagtaatttagttcccggcacaaaaaatcgcttagatgttacgttaaatggagaaatagggacaccttacttgtttgatttaccaaattaa

SEQ ID NO: 46 - protein, 261 aa
MKKIALFSMLTFSVLSLSLAGCGNKKTASTNDSKPKQETKKATQKSSSQQEMKSSHSSVTGQNSNVTGENPSENATQPSAGTDETNEVPQNQAPDTNITITNVVFNPERNEINGTTLPNATITATVVGDASAQAGVFYADANGNFTVISPRAGATTQLIATVDQRNSAPVQIDIPSSGQEAALSFSNITIDPKQGTISGKTAPNATILVSRADDARVILASFTADAQGNFTASNLVPGTKNRLDVTLNGEIGTPYLFDLPN

SEQ ID NO: 47 - DNA, 721 bp; double-stranded, linear
atgtggaaacaaaaaaacagcaagcacaaatgattctaagccaaagcaagaaacaaagaaagccacgcagaaatcctctagccaacaagaaatgaaaagtagtcattcgtctgtcacgggtcaaaattctaatgtgacaggggaaaatccgtcagaaaatgccacgcagccttctgcaggaactgatgaaacgaatgaagtccctcaaaaccaagcacctgatacaaacattacaattaccaatgttgttttcaatcctgaaagaaatgaaattaatggtactacattacctaatgcaaccattacagcaacggtagtcggtgatgcttctgcacaagcaggtgttttttatgcggatgccaatggcaattttacagtaattagtcccagagcgggagcgactactcaattaatcgcaaccgttgatcaacggaatagtgcacctgtccaaattgatattccaagttcaggacaagaagcagcgctttcttttagcaatattacgattgatccgaaacaagggacaatttctggtaaaacagcaccgaatgcaactattttagtgtcacgtgcagatgatgcgcgggtgattttagcaagttttactgcggatgcccaagggaatttcacagccagtaatttagttcccggcacaaaaaatcgcttagatgttacgttaaatggagaaatagggacaccttacttgtttgatttaccaaat

SEQ ID NO: 48 - protein, 240 aa
CGNKKTASTNDSKPKQETKKATQKSSSQQEMKSSHSSVTGQNSNVTGENPSENATQPSAGTDETNEVPQNQAPDTNITITNVVFNPERNEINGTTLPNATITATVVGDASAQAGVFYADANGNFTVISPRAGATTQLIATVDQRNSAPVQIDIPSSGQEAALSFSNITIDPKQGTISGKTAPNATILVSRADDARVILASFTADAQGNFTASNLVPGTKNRLDVTLNGEIGTPYLFDLPN

SEQ ID NO: 49 - DNA, 1164 bp; double-stranded, linear
tgatggtggagactttttaagagagaggaagtacagccaatgagtaggaagcgaaaaatcagcttaattagtttagtcatcattttggtttttgtcacagtcggctcagcatactttgctgtagcgggtagctatttaaagaaaacaattgataaaggctatgttcccataaaaaatgattataatgaagcgcaaaataaagatagtcaatcgtttttgattatggggctagacaatacaattgaacggaaattaggcacaactaggactgatgctatgatggtgattaccgtgaataacaagacgaagaaaataacctatttaagtttgccacgggatagttttgttcaaattgatgcgaaaaattaccaagggatgcagcgaattgaagccgcctatacctacgatggaccaacagcttctgttaacacagttgagaaattattgaatattccaatcaatcattacgttgtgtttaactttttatcttttattaagttaattgatgcggttggcggcatagatgtcaatgtcaagcaggcgtttgatggtgtcaccaaagacgggccaggatccattcattttgatgcagggaaacagcatttagatggtacgaaagctttatcttatgcccgtgaaagacatagcgataacgatattatgcgtggattccgacaacaagaaattattcaagcagttgaagacaagttgaaatctggtcaatcaatcatgaaaataatggacattattgattcgttaaatggaaacattcaaactgatgtggattccaatgaattgactcatttagtcaaagaaggtttgacttggaccaattatgataaacaacagctttcttttgactggcgcacttttagtaatgaagggcgcagtatggttgaactatacccagatagtattgaaaatgtccgtcatcaattacgtgtgtctttaaatttagaaaagccagatgaacgagatcaagacggctatgtcttccatacgaacggtgaatttttatatcaaagtgattataccgttcaagatgaagcagctgaggaaaacgaaatgacttccatcaacggcaatacgtatattggtgttcctggtaatacacagaccggcccgttgccatcagttaaaacggaaaatggctttataaaataa

SEQ ID NO: 50 - protein, 374 aa
MSRKRKISLISLVIILVFVTVGSAYFAVAGSYLKKTIDKGYVPIKNDYNEAQNKDSQSFLIMGLDNTIERKLGTTRTDAMMVITVNNKTKKITYLSLPRDSFVQIDAKNYQGMQRIEAAYTYDGPTASVNTVEKLLNIPINHYVVFNFLSFIKLIDAVGGIDVNVKQAFDGVTKDGPGSIHFDAGKQHLDGTKALSYARERHSDNDIMRGFRQQEIIQAVEDKLKSGQSIMKIMDIIDSLNGNIQTDVDSNELTHLVKEGLTWTNYDKQQLSFDWRTFSNEGRSMVELYPDSIENVRHQLRVSLNLEKPDERDQDGYVFHTNGEFLYQSDYTVQDEAAEENEMTSINGNTYIGVPGNTQTGPLPSVKTENGFIK

SEQ ID NO: 51 - DNA, 1045 bp; double-stranded, linear
tgctgtagcgggtagctatttaaagaaaacaattgataaaggctatgttcccataaaaaatgattataatgaagcgcaaaataaagatagtcaatcgtttttgattatggggctagacaatacaattgaacggaaattaggcacaactaggactgatgctatgatggtgattaccgtgaataacaagacgaagaaaataacctatttaagtttgccacgggatagttttgttcaaattgatgcgaaaaattaccaagggatgcagcgaattgaagccgcctatacctacgatggaccaacagcttctgttaacacagttgagaaattattgaatattccaatcaatcattacgttgtgtttaactttttatcttttattaagttaattgatgcggttggcggcatagatgtcaatgtcaagcaggcgtttgatggtgtcaccaaagacgggccaggatccattcattttgatgcagggaaacagcatttagatggtacgaaagctttatcttatgcccgtgaaagacatagcgataacgatattatgcgtggattccgacaacaagaaattattcaagcagttgaagacaagttgaaatctggtcaatcaatcatgaaaataatggacattattgattcgttaaatggaaacattcaaactgatgtggattccaatgaattgactcatttagtcaaagaaggtttgacttggaccaattatgataaacaacagctttcttttgactggcgcacttttagtaatgaagggcgcagtatggttgaactatacccagatagtattgaaaatgtccgtcatcaattacgtgtgtctttaaatttagaaaagccagatgaacgagatcaagacggctatgtcttccatacgaacggtgaatttttatatcaaagtgattataccgttcaagatgaagcagctgaggaaaacgaaatgacttccatcaacggcaatacgtatattggtgttcctggtaatacacagaccggcccgttgccatcagttaaaacggaaaatggctttataaaa

SEQ ID NO: 52 - protein, 348 aa
AVAGSYLKKTIDKGYVPIKNDYNEAQNKDSQSFLIMGLDNTIERKLGTTRTDAMMVITVNNKTKKITYLSLPRDSFVQIDAKNYQGMQRIEAAYTYDGPTASVNTVEKLLNIPINHYVVFNFLSFIKLIDAVGGIDVNVKQAFDGVTKDGPGSIHFDAGKQHLDGTKALSYARERHSDNDIMRGFRQQEIIQAVEDKLKSGQSIMKIMDIIDSLNGNIQTDVDSNELTHLVKEGLTWTNYDKQQLSFDWRTFSNEGRSMVELYPDSIENVRHQLRVSLNLEKPDERDQDGYVFHTNGEFLYQSDYTVQDEAAEENEMTSINGNTYIGVPGNTQTGPLPSVKTENGFIK

SEQ ID NO: 53 - DNA, 414 bp; double-stranded, linear
taattaaaaatgtgtaaaaagggtctgatgaaaaaaggagacataatagttattatctttttaatagctatctctttttctccatattttattttttttcacaataatccatttaactccaaaagttttgacgacactaaatatgctgtggtcaagatagatgggaaagagattgagcgtataaatttagatgattcaaaagaatttatcaaaacatattatccatcaaaagggcaatataatactatagaagttaaaaatgggcacgttcgtgtaaaaaaagataatagtccagatcaaattgcggtgaaaacaggatggatatcagaaccagggcnaactagtatctgtattcctcacagattcattttagaaattgttcaacaatattctaaggattattatatttactaa

SEQ ID NO: 54 - protein, 128 aa
MKKGDIIVIIFLIAISFSPYFIFFHNNPFNSKSFDDTKYAVVKIDGKEIERINLDDSKEFIKTYYPSKGQYNTIEVKNGHVRVKKDNSPDQIAVKTGWISEPGXTSICIPHRFILEIVQQYSKDYYIY

SEQ ID NO: 55 - DNA, 310 bp; double-stranded, linear
caataatccatttaactccaaaagttttgacgacactaaatatgctgtggtcaagatagatgggaaagagattgagcgtataaatttagatgattcaaaagaatttatcaaaacatattatccatcaaaagggcaatataatactatagaagttaaaaatgggcacgttcgtgtaaaaaaagataatagtccagatcaaattgcggtgaaaacaggatggatatcagaaccagggcnaactagtatctgtattcctcacagattcattttagaaattgttcaacaatattctaaggattattatatttac

SEQ ID NO: 56 - protein, 103 aa
NNPFNSKSFDDTKYAVVKIDGKEIERINLDDSKEFIKTYYPSKGQYNTIEVKNGHVRVKKDNSPDQIAVKTGWISEPGXTSICIPHRFILEIVQQYSKDYYIY

SEQ ID NO: 57 - DNA, 867 bp; double-stranded, linear
tgacggttgcccccgtccaatagaaaggagtttatgatgaaaaagaaatattctttagccttgctggttatctgttgtagtttactcctatttgcaggttgtggtaaaagaaaaagcaacgaagatcaatggacacggattaacgaagaaaaacggattattattggcttagatgactcctttgtgcccatgggttttcaagataaatcaggcaaaattgtcggctttgatgtcgacttagccaaagcggtttttaaactttatggcatttccgttgacttccaaccgattgattggtctatgaaagaaacagaattacaaaatcaaaccattgatcttatttggaacggctacactaaaacgagcgagcgggccgaaaaagttcaattcacacaaccttacatgacgaacgaccaagtacttgtttctttaaaagaaaaaaacattgcaacagcgagcgacatgcaaggcaaaattttaggggttcaaaacggctcttctggctatgatggcttcgaaagtcagcctgacgttttgaaaaaatttgttaaagaccaaacacctattttatatgacggctttaatgaagctttcttagatttaaaatctggtcgaattgacggactcctaatcgatcgcgtttacgccaactactatctttcccacgaagataatttaaaaaactatactatttctcatgtaggctatgacaatgaagattttgctgtgggcgtccgcaaatcagacaatcaattagtccaaaaaatcaatactgcctttgaaacgttacgaaaagatggcacccttagtaaaatttctcaaaaatggtttggagaggacgttacaaataacacaaaaataaactaa

SEQ ID NO: 58 - protein, 277 aa
MMKKKYSLALLVICCSLLLFAGCGKRKSNEDQWTRINEEKRIIIGLDDSFVPMGFQDKSGKIVGFDVDLAKAVFKLYGISVDFQPIDWSMKETELQNQTIDLIWNGYTKTSERAEKVQFTQPYMTNDQVLVSLKEKNIATASDMQGKILGVQNGSSGYDGFESQPDVLKKFVKDQTPILYDGFNEAFLDLKSGRIDGLLIDRVYANYYLSHEDNLKNYTISHVGYDNEDFAVGVRKSDNQLVQKINTAFETLRKDGTLSKISQKWFGEDVTNNTKIN

SEQ ID NO: 59 - DNA, 751 bp; double-stranded, linear
aagcaacgaagatcaatggacacggattaacgaagaaaaacggattattattggcttagatgactcctttgtgcccatgggttttcaagataaatcaggcaaaattgtcggctttgatgtcgacttagccaaagcggtttttaaactttatggcatttccgttgacttccaaccgattgattggtctatgaaagaaacagaattacaaaatcaaaccattgatcttatttggaacggctacactaaaacgagcgagcgggccgaaaaagttcaattcacacaaccttacatgacgaacgaccaagtacttgtttctttaaaagaaaaaaacattgcaacagcgagcgacatgcaaggcaaaattttaggggttcaaaacggctcttctggctatgatggcttcgaaagtcagcctgacgttttgaaaaaatttgttaaagaccaaacacctattttatatgacggctttaatgaagctttcttagatttaaaatctggtcgaattgacggactcctaatcgatcgcgtttacgccaactactatctttcccacgaagataatttaaaaaactatactatttctcatgtaggctatgacaatgaagattttgctgtgggcgtccgcaaatcagacaatcaattagtccaaaaaatcaatactgcctttgaaacgttacgaaaagatggcacccttagtaaaatttctcaaaaatggtttggagaggacgttacaaataacacaaaaataaac

SEQ ID NO: 60 - protein, 250 aa
SNEDQWTRINEEKRIIIGLDDSFVPMGFQDKSGKIVGFDVDLAKAVFKLYGISVDFQPIDWSMKETELQNQTIDLIWNGYTKTSERAEKVQFTQPYMTNDQVLVSLKEKNIATASDMQGKILGVQNGSSGYDGFESQPDVLKKFVKDQTPILYDGFNEAFLDLKSGRIDGLLIDRVYANYYLSHEDNLKNYTISHVGYDNEDFAVGVRKSDNQLVQKINTAFETLRKDGTLSKISQKWFGEDVTNNTKIN

SEQ ID NO: 61 - DNA, 1641 bp; double-stranded, linear
tgaggtgtttttatgaaaagggcaacaaagcaaaggctgtctttggcagcaatcatggttctacttctctcgggctgtggaagtgttgggaaagaaaccaaaaagcaagaacaacaggtattacgggtcgggattgattcggaattatcaacggcagacgtgtcgttggcaatggataataccgcagcagatgtaatgagccaagtaggggagggacttttctcctttgacgaaaaaggagaagcgaaaccagcattggcaactgaaaaagtacagccctccaatgatggtttaagctatacttttacgattcgaaaagatgcaaaatggagtaacggcgagccaatcacagcaaatgattttgaatactcttggaagcgcacagtggacccaaaaacagcttccccgcaagcgtattactttgaagggttaaaaaattatcgtgctattgttgacggtagcaaatctaaagaagagttaggggtaacagccattgatgaccataccttggaagtagagctaagctatcctatgagttattttcaacaattattggcggtaccagctttttatcctttaaatgaagcatttgtcgaaaaaacgggcaaaaactatggtacatcagctgagtcaacactttacaatggcgccttcacattagaaggttgggatggcacgaataatacttggtcctatgtgaagaataaaaattattgggatcaagcgaatgtttcgctagataaggtggatgtccaagtagttaaagaagtcaatactgggaaaaatcttttcgaagggaaagaattagatgttgtaaaaatttctggagaaattgttgcacaagaacaaggcaatgcagctttgaaaattcgtgaaattcctggaacgtattatatccaattaaatacgcaaaaagatcttttggcaaataagaatgcacgtcgagcaatagcattatcattgaattctgagcgtttagctaaaaatgttttaaatgatggctcaaaaaaagcacttggcttcgtgccaacaggtttcactaatcaagaaacgcaaaaagattttgcagaggaattaggagatttaaatcctagtgaaccagaaaaagcgaaagagttatggcaaacggctaaaaaagaattaggaattgaaaaagcggagctaacgattttaagttcggatacagaaaatgctaaaaaaatcagtgagtatgttcaaggagctttagcagataatttagaaaatttaacagtcaatgtttcaccagttccttttaataatcgtttagaaaaaagtcgcagcggagatttcgacattgtggttggtggctggacgccagtatatgctgatccaatcgatttcttaaacttactgcaatcaaaaaattccaataattttggtaaatggtctaataagacctttgatcagttgcttcaagaagcaaacgtaacttatgcaaataaatatgaagaacgttggaaaacattacaaaaagcggatcaattggttgcggaagaagcccccctagttcctctttatcaattaacagaagcacgcttagtggccgattctgtccaaaatttagtctatggtccattaggttcaggctattacaaatcagtctctatcggcgacaagtaa

SEQ ID NO: 62 - protein, 542 aa
MKRATKQRLSLAAIMVLLLSGCGSVGKETKKQEQQVLRVGIDSELSTADVSLAMDNTAADVMSQVGEGLFSFDEKGEAKPALATEKVQPSNDGLSYTFTIRKDAKWSNGEPITANDFEYSWKRTVDPKTASPQAYYFEGLKNYRAIVDGSKSKEELGVTAIDDHTLEVELSYPMSYFQQLLAVPAFYPLNEAFVEKTGKNYGTSAESTLYNGAFTLEGWDGTNNTWSYVKNKNYWDQANVSLDKVDVQVVKEVNTGKNLFEGKELDVVKISGEIVAQEQGNAALKIREIPGTYYIQLNTQKDLLANKNARRAIALSLNSERLAKNVLNDGSKKALGFVPTGFTNQETQKDFAEELGDLNPSEPEKAKELWQTAKKELGIEKAELTILSSDTENAKKISEYVQGALADNLENLTVNVSPVPFNNRLEKSRSGDFDIVVGGWTPVYADPIDFLNLLQSKNSNNFGKWSNKTFDQLLQEANVTYANKYEERWKTLQKADQLVAEEAPLVPLYQLTEARLVADSVQNLVYGPLGSGYYKSVSIGDK

SEQ ID NO: 63 - DNA, 1564 bp; double-stranded, linear
ctgtggaagtgttgggaaagaaaccaaaaagcaagaacaacaggtattacgggtcgggattgattcggaattatcaacggcagacgtgtcgttggcaatggataataccgcagcagatgtaatgagccaagtaggggagggacttttctcctttgacgaaaaaggagaagcgaaaccagcattggcaactgaaaaagtacagccctccaatgatggtttaagctatacttttacgattcgaaaagatgcaaaatggagtaacggcgagccaatcacagcaaatgattttgaatactcttggaagcgcacagtggacccaaaaacagcttccccgcaagcgtattactttgaagggttaaaaaattatcgtgctattgttgacggtagcaaatctaaagaagagttaggggtaacagccattgatgaccataccttggaagtagagctaagctatcctatgagttattttcaacaattattggcggtaccagctttttatcctttaaatgaagcatttgtcgaaaaaacgggcaaaaactatggtacatcagctgagtcaacactttacaatggcgccttcacattagaaggttgggatggcacgaataatacttggtcctatgtgaagaataaaaattattgggatcaagcgaatgtttcgctagataaggtggatgtccaagtagttaaagaagtcaatactgggaaaaatcttttcgaagggaaagaattagatgttgtaaaaatttctggagaaattgttgcacaagaacaaggcaatgcagctttgaaaattcgtgaaattcctggaacgtattatatccaattaaatacgcaaaaagatcttttggcaaataagaatgcacgtcgagcaatagcattatcattgaattctgagcgtttagctaaaaatgttttaaatgatggctcaaaaaaagcacttggcttcgtgccaacaggtttcactaatcaagaaacgcaaaaagattttgcagaggaattaggagatttaaatcctagtgaaccagaaaaagcgaaagagttatggcaaacggctaaaaaagaattaggaattgaaaaagcggagctaacgattttaagttcggatacagaaaatgctaaaaaaatcagtgagtatgttcaaggagctttagcagataatttagaaaatttaacagtcaatgtttcaccagttccttttaataatcgtttagaaaaaagtcgcagcggagatttcgacattgtggttggtggctggacgccagtatatgctgatccaatcgatttcttaaacttactgcaatcaaaaaattccaataattttggtaaatggtctaataagacctttgatcagttgcttcaagaagcaaacgtaacttatgcaaataaatatgaagaacgttggaaaacattacaaaaagcggatcaattggttgcggaagaagcccccctagttcctctttatcaattaacagaagcacgcttagtggccgattctgtccaaaatttagtctatggtccattaggttcaggctattacaaatcagtctctatcggcgacaag

SEQ ID NO: 64 - protein, 521 aa
CGSVGKETKKQEQQVLRVGIDSELSTADVSLAMDNTAADVMSQVGEGLFSFDEKGEAKPALATEKVQPSNDGLSYTFTIRKDAKWSNGEPITANDFEYSWKRTVDPKTASPQAYYFEGLKNYRAIVDGSKSKEELGVTAIDDHTLEVELSYPMSYFQQLLAVPAFYPLNEAFVEKTGKNYGTSAESTLYNGAFTLEGWDGTNNTWSYVKNKNYWDQANVSLDKVDVQVVKEVNTGKNLFEGKELDVVKISGEIVAQEQGNAALKIREIPGTYYIQLNTQKDLLANKNARRAIALSLNSERLAKNVLNDGSKKALGFVPTGFTNQETQKDFAEELGDLNPSEPEKAKELWQTAKKELGIEKAELTILSSDTENAKKISEYVQGALADNLENLTVNVSPVPFNNRLEKSRSGDFDIVVGGWTPVYADPIDFLNLLQSKNSNNFGKWSNKTFDQLLQEANVTYANKYEERWKTLQKADQLVAEEAPLVPLYQLTEARLVADSVQNLVYGPLGSGYYKSVSIGDK

SEQ ID NO: 65 - DNA, 1707 bp; double-stranded, linear
tgtcattacaacgataccaattttaatcatttatccattactacaaaaacactttatcggcggtatgatggccggtgcagtaaaagaataaagaaagtagggaacaatatgaaaaaagttttaggcggtttattggtggcaacggcggtcgttagtttagcggcctgtagcggtggggaaaagaaagctagctcagatgtctcaattaaggatcggtatgaattagatgaaaagacgcctgcttggaagttagataagaagaaagaaccgaccaagattaaatggtatattaactcagattggacggcgctgccttttggaaaagacgtgaccactgcgcagattaaaaaagacttaaatgtggatattgaatttatttccggcgatgattcaaaattaaatgccatgatttcaagtggagatatgcctgatatcgtgacattaactgaaaaaactggacaagcagcattgaaagcagattcttgggcctattctttaaacgatttagctaaaaaatatgacccctatttaatgaaagttgttaaccaagatacgtttaaatggtatgccttagaggatggaaaaacatatggttaccctaattactctaatacaaaagcggattatgaaagtggaaatatcccagtaaatgataattttgttattcgtgaagatgtctataatgcattaggcaagccagacgtttcaacaccagaaaattttgaaaaagtcatgcaacagattaaagaaaaatatcctgagatgaccccaatgggcttcaccacagtgggcgatggtgcaggaccatttttagacaaattacaagacttcttaggtgttcctttagaggataaaaatggtaaatactatgatcgaaatttagataaagaatatttagaatggttaaaaacatttaatgatgtttaccgagcaggcaatattagtgatgatagcttcacagatgatggggcaacgtttgatgaaaaagtgaaacaaggaaattatgcaaccatgctcgttgctggaaccagtggtcaaggtgggaacttcacagaatttatgaaaaaatctggcacacgttatatagccattgatggaccaagtagcacttctggccgaaaaccaacattaaatcaaaccggcatttcaggttggttaagtaattacattacgaaagatgcgaaagatccagcaaaagtcactcaactgttcacatatttaattgatgaaccgggacaaattttaacaaaatatggcgttgaaggagttacttatgcgtacaatgatcaaggaaaaattgattatttaccagaagtgaaaaaattagaacaaacagacaatgatgcctacaacaaaaaatatggcattagtcgtttcctatactttaacaacgaccgtgtcaataaactaaaagtaccaatggaaagtgctttaacgcaaatgcaagaatggggcaaaggaaaattagtcccacatttcgtaattgaaaatattaatccagatgcaggaacgccggaagctcgtgcgaatgaagcgattgaaaccaaactaaatacaaccgttatttcaatgattcgtgcgaaagatgataaagcctttgacaaatctttagaagactacaaagcattcttaaaatcaaataaatgggatgcaattgaaaaaataaaatctgagaaaatggcggaaaacagagacaaacttaagtaa

SEQ ID NO: 66 - protein, 532 aa
MKKVLGGLLVATAVVSLAACSGGEKKASSDVSIKDRYELDEKTPAWKLDKKKEPTKIKWYINSDWTALPFGKDVTTAQIKKDLNVDIEFISGDDSKLNAMISSGDMPDIVTLTEKTGQAALKADSWAYSLNDLAKKYDPYLMKVVNQDTFKWYALEDGKTYGYPNYSNTKADYESGNIPVNDNFVIREDVYNALGKPDVSTPENFEKVMQQIKEKYPEMTPMGFTTVGDGAGPFLDKLQDFLGVPLEDKNGKYYDRNLDKEYLEWLKTFNDVYRAGNISDDSFTDDGATFDEKVKQGNYATMLVAGTSGQGGNFTEFMKKSGTRYIAIDGPSSTSGRKPTLNQTGISGWLSNYITKDAKDPAKVTQLFTYLIDEPGQILTKYGVEGVTYAYNDQGKIDYLPEVKKLEQTDNDAYNKKYGISRFLYFNNDRVNKLKVPMESALTQMQEWGKGKLVPHFVIENINPDAGTPEARANEAIETKLNTTVISMIRAKDDKAFDKSLEDYKAFLKSNKWDAIEKIKSEKMAENRDKLK

SEQ ID NO: 67 - DNA, 1540 bp; double-stranded, linear
ctgtagcggtggggaaaagaaagctagctcagatgtctcaattaaggatcggtatgaattagatgaaaagacgcctgcttggaagttagataagaagaaagaaccgaccaagattaaatggtatattaactcagattggacggcgctgccttttggaaaagacgtgaccactgcgcagattaaaaaagacttaaatgtggatattgaatttatttccggcgatgattcaaaattaaatgccatgatttcaagtggagatatgcctgatatcgtgacattaactgaaaaaactggacaagcagcattgaaagcagattcttgggcctattctttaaacgatttagctaaaaaatatgacccctatttaatgaaagttgttaaccaagatacgtttaaatggtatgccttagaggatggaaaaacatatggttaccctaattactctaatacaaaagcggattatgaaagtggaaatatcccagtaaatgataattttgttattcgtgaagatgtctataatgcattaggcaagccagacgtttcaacaccagaaaattttgaaaaagtcatgcaacagattaaagaaaaatatcctgagatgaccccaatgggcttcaccacagtgggcgatggtgcaggaccatttttagacaaattacaagacttcttaggtgttcctttagaggataaaaatggtaaatactatgatcgaaatttagataaagaatatttagaatggttaaaaacatttaatgatgtttaccgagcaggcaatattagtgatgatagcttcacagatgatggggcaacgtttgatgaaaaagtgaaacaaggaaattatgcaaccatgctcgttgctggaaccagtggtcaaggtgggaacttcacagaatttatgaaaaaatctggcacacgttatatagccattgatggaccaagtagcacttctggccgaaaaccaacattaaatcaaaccggcatttcaggttggttaagtaattacattacgaaagatgcgaaagatccagcaaaagtcactcaactgttcacatatttaattgatgaaccgggacaaattttaacaaaatatggcgttgaaggagttacttatgcgtacaatgatcaaggaaaaattgattatttaccagaagtgaaaaaattagaacaaacagacaatgatgcctacaacaaaaaatatggcattagtcgtttcctatactttaacaacgaccgtgtcaataaactaaaagtaccaatggaaagtgctttaacgcaaatgcaagaatggggcaaaggaaaattagtcccacatttcgtaattgaaaatattaatccagatgcaggaacgccggaagctcgtgcgaatgaagcgattgaaaccaaactaaatacaaccgttatttcaatgattcgtgcgaaagatgataaagcctttgacaaatctttagaagactacaaagcattcttaaaatcaaataaatgggatgcaattgaaaaaataaaatctgagaaaatggcggaaaacagagacaaacttaag

SEQ ID NO: 68 - protein, 513 aa
CSGGEKKASSDVSIKDRYELDEKTPAWKLDKKKEPTKIKWYINSDWTALPFGKDVTTAQIKKDLNVDIEFISGDDSKLNAMISSGDMPDIVTLTEKTGQAALKADSWAYSLNDLAKKYDPYLMKVVNQDTFKWYALEDGKTYGYPNYSNTKADYESGNIPVNDNFVIREDVYNALGKPDVSTPENFEKVMQQIKEKYPEMTPMGFTTVGDGAGPFLDKLQDFLGVPLEDKNGKYYDRNLDKEYLEWLKTFNDVYRAGNISDDSFTDDGATFDEKVKQGNYATMLVAGTSGQGGNFTEFMKKSGTRYIAIDGPSSTSGRKPTLNQTGISGWLSNYITKDAKDPAKVTQLFTYLIDEPGQILTKYGVEGVTYAYNDQGKIDYLPEVKKLEQTDNDAYNKKYGISRFLYFNNDRVNKLKVPMESALTQMQEWGKGKLVPHFVIENINPDAGTPEARANEAIETKLNTTVISMIRAKDDKAFDKSLEDYKAFLKSNKWDAIEKIKSEKMAENRDKLK

SEQ ID NO: 69 - DNA, 954 bp; double-stranded, linear
taaaggagttacacaatgaaacttttaaaaaagacggtcctaattggtacaacccttcttcttggttcattcttactcgcagcttgtggtaatacgaataaagaagccaacaacgctgacaaaacacatgaagtaacagataccttaggcaataaagtaaccgtccccgcgaaacccaaacggattattgcgagttatttagaagattatctagttgcattaggagaaaaaccagtggcacaatggacagttggacaaggcagcattcaagattatttagcgaaagaattgaaagatgtccccactatttcctatgacttgccatatgaagcggttctaaaatttgaacctgacttattattaatcagttcatctgctctagttgaaggcggtaaatacaaagaatacagtaaaattgcgccaacttatgtagtcaaaaacggcgaaaatgtcacctggcgtgatcaattggaagatattgccactgttttagataaaaaagaacaagcgaaaaaagtgttagaagattatgataccttaaccaaaggcgtccaagaatatcttggcaaaaaagatgctggcaaatctgcggcagtcttatgggtaaccaacaaccaagtctttatggttagcgataatcgctcaagcggaaccgtgctctatcaggacttaggcctccaagttccaaaattagtggaagaaatttctaaaaacgctactgcggattggaatcaagtttctttagaaaaattagctgagcttgacgcagaccacattttccttgtaaacagcgatgaatcagcacctcttttccaagaagcaatttggaagaacttacctgctgtgaaaaataaccaagttcatacctatgataaaaaaagtagttggttatacaacggacctattgcgaatactcaaattgttgaagatgtaaaaaaagcgctcttaaattaa

SEQ ID NO: 70 - protein, 312 aa
MKLLKKTVLIGTTLLLGSFLLAACGNTNKEANNADKTHEVTDTLGNKVTVPAKPKRIIASYLEDYLVALGEKPVAQWTVGQGSIQDYLAKELKDVPTISYDLPYEAVLKFEPDLLLISSSALVEGGKYKEYSKIAPTYVVKNGENVTWRDQLEDIATVLDKKEQAKKVLEDYDTLTKGVQEYLGKKDAGKSAAVLWVTNNQVFMVSDNRSSGTVLYQDLGLQVPKLVEEISKNATADWNQVSLEKLAELDADHIFLVNSDESAPLFQEAIWKNLPAVKNNQVHTYDKKSSWLYNGPIANTQIVEDVKKALLN

SEQ ID NO: 71 - DNA, 868 bp; double-stranded, linear
ttgtggtaatacgaataaagaagccaacaacgctgacaaaacacatgaagtaacagataccttaggcaataaagtaaccgtccccgcgaaacccaaacggattattgcgagttatttagaagattatctagttgcattaggagaaaaaccagtggcacaatggacagttggacaaggcagcattcaagattatttagcgaaagaattgaaagatgtccccactatttcctatgacttgccatatgaagcggttctaaaatttgaacctgacttattattaatcagttcatctgctctagttgaaggcggtaaatacaaagaatacagtaaaattgcgccaacttatgtagtcaaaaacggcgaaaatgtcacctggcgtgatcaattggaagatattgccactgttttagataaaaaagaacaagcgaaaaaagtgttagaagattatgataccttaaccaaaggcgtccaagaatatcttggcaaaaaagatgctggcaaatctgcggcagtcttatgggtaaccaacaaccaagtctttatggttagcgataatcgctcaagcggaaccgtgctctatcaggacttaggcctccaagttccaaaattagtggaagaaatttctaaaaacgctactgcggattggaatcaagtttctttagaaaaattagctgagcttgacgcagaccacattttccttgtaaacagcgatgaatcagcacctcttttccaagaagcaatttggaagaacttacctgctgtgaaaaataaccaagttcatacctatgataaaaaaagtagttggttatacaacggacctattgcgaatactcaaattgttgaagatgtaaaaaaagcgctcttaaat

SEQ ID NO: 72 - protein, 289 aa
CGNTNKEANNADKTHEVTDTLGNKVTVPAKPKRIIASYLEDYLVALGEKPVAQWTVGQGSIQDYLAKELKDVPTISYDLPYEAVLKFEPDLLLISSSALVEGGKYKEYSKIAPTYVVKNGENVTWRDQLEDIATVLDKKEQAKKVLEDYDTLTKGVQEYLGKKDAGKSAAVLWVTNNQVFMVSDNRSSGTVLYQDLGLQVPKLVEEISKNATADWNQVSLEKLAELDADHIFLVNSDESAPLFQEAIWKNLPAVKNNQVHTYDKKSSWLYNGPIANTQIVEDVKKALLN

SEQ ID NO: 73 - DNA, 375 bp; double-stranded, linear
tgaggagatgagaaaatgaaaaaggtagtttcaattttgttgatggttgttgcagtcttcacattaactgcatgtaatggttctaaattagataaaacaggtgaagaatttaaaaattctataatgaaagattcttcatatggtgatgaatattcagaagatggttttagttttttaatatataaagataaagacactaatcgttatttggctgatgtttgggttcctgttaaagatgaaactagcgcattggagtatttttattattatgatgaagataagcgattagatagtactaaaagtaaagtaacctttgatgatatgaaagctagtggaaactatgaagtagtgtataaatcagggaaatttaaataa

SEQ ID NO: 74 - protein, 119 aa
MKKVVSILLMVVAVFTLTACNGSKLDKTGEEFKNSIMKDSSYGDEYSEDGFSFLIYKDKDTNRYLADVWVPVKDETSALEYFYYYDEDKRLDSTKSKVTFDDMKASGNYEVVYKSGKFK

SEQ ID NO: 75 - DNA, 301 bp; double-stranded, linear
atgtaatggttctaaattagataaaacaggtgaagaatttaaaaattctataatgaaagattcttcatatggtgatgaatattcagaagatggttttagttttttaatatataaagataaagacactaatcgttatttggctgatgtttgggttcctgttaaagatgaaactagcgcattggagtatttttattattatgatgaagataagcgattagatagtactaaaagtaaagtaacctttgatgatatgaaagctagtggaaactatgaagtagtgtataaatcagggaaatttaaa

SEQ ID NO: 76 - protein, 100 aa
CNGSKLDKTGEEFKNSIMKDSSYGDEYSEDGFSFLIYKDKDTNRYLADVWVPVKDETSALEYFYYYDEDKRLDSTKSKVTFDDMKASGNYEVVYKSGKFK

SEQ ID NO: 77 - DNA, 1131 bp; double-stranded, linear
tagttgtttaaatacattaaactatttttaggaggctttacagaaatgaaaaaagcaaaattattcggttttagtttgattgcattaggtttatcagtttcacttgcagcatgtggtggtggcaaaggcaaaaccgctgaaagcggcggtggcaaaggggatgcagcgcatagtgctgtaatcattacagatacaggcggcgtggatgacaagtcgttcaaccaatcttcttgggaaggattgcaagcttggggtaaagaacatgatttaccagaaggttcaaaagggtatgcatatattcaatcgaatgatgcagctgactatacaaccaatattgaccaagcggtatcaagtaaattcaacacaatctttggtattggctacttgctaaaagatgcaatttcttctgcagcagatgccaaccctgatacaaactttgttttaatcgatgatcaaatcgatggcaaaaagaatgtcgtttctgcaacatttagagataatgaagcagcttacttagccggtgttgctgctgcaaatgaaacaaaaacgaacaaagtcggttttgttggtggtgaagaaggggtcgtaattgaccgtttccaagctggttttgaaaaaggtgtggctgatgctgcgaaagaattaggtaaagaaattactgttgatacgaaatatgcggcttcatttgctgatcctgccaaagggaaagctttagctgctgcaatgtaccaaaacggcgttgatatcatcttccatgcttctggtgcgactggacaaggggtcttccaagaagcaaaagacttgaatgaatcaggttctggcgacaaagtttgggtaatcggcgttgaccgcgatcaagatgctgatggcaagtacaaaacaaaagacggcaaagaagacaacttcacgttaacttcaacgcttaaaggtgtcggcacagcggttcaagatattgccaaccgtgcgttagaagacaaattccctggtggcgaacatttagtttatggattaaaagatggtggcgttgacttaacagacggctatttaaacgacaaaacaaaagaagctgttaaaacagcaaaagataaagtaatctcaggtgacgtaaaagtcccagaaaaaccagaataa

SEQ ID NO: 78 - protein, 361 aa
MKKAKLFGFSLIALGLSVSLAACGGGKGKTAESGGGKGDAAHSAVIITDTGGVDDKSFNQSSWEGLQAWGKEHDLPEGSKGYAYIQSNDAADYTTNIDQAVSSKFNTIFGIGYLLKDAISSAADANPDTNFVLIDDQIDGKKNVVSATFRDNEAAYLAGVAAANETKTNKVGFVGGEEGVVIDRFQAGFEKGVADAAKELGKEITVDTKYAASFADPAKGKALAAAMYQNGVDIIFHASGATGQGVFQEAKDLNESGSGDKVWVIGVDRDQDADGKYKTKDGKEDNFTLTSTLKGVGTAVQDIANRALEDKFPGGEHLVYGLKDGGVDLTDGYLNDKTKEAVKTAKDKVISGDVKVPEKPE

SEQ ID NO: 79 - DNA, 1018 bp; double-stranded, linear
atgtggtggtggcaaaggcaaaaccgctgaaagcggcggtggcaaaggggatgcagcgcatagtgctgtaatcattacagatacaggcggcgtggatgacaagtcgttcaaccaatcttcttgggaaggattgcaagcttggggtaaagaacatgatttaccagaaggttcaaaagggtatgcatatattcaatcgaatgatgcagctgactatacaaccaatattgaccaagcggtatcaagtaaattcaacacaatctttggtattggctacttgctaaaagatgcaatttcttctgcagcagatgccaaccctgatacaaactttgttttaatcgatgatcaaatcgatggcaaaaagaatgtcgtttctgcaacatttagagataatgaagcagcttacttagccggtgttgctgctgcaaatgaaacaaaaacgaacaaagtcggttttgttggtggtgaagaaggggtcgtaattgaccgtttccaagctggttttgaaaaaggtgtggctgatgctgcgaaagaattaggtaaagaaattactgttgatacgaaatatgcggcttcatttgctgatcctgccaaagggaaagctttagctgctgcaatgtaccaaaacggcgttgatatcatcttccatgcttctggtgcgactggacaaggggtcttccaagaagcaaaagacttgaatgaatcaggttctggcgacaaagtttgggtaatcggcgttgaccgcgatcaagatgctgatggcaagtacaaaacaaaagacggcaaagaagacaacttcacgttaacttcaacgcttaaaggtgtcggcacagcggttcaagatattgccaaccgtgcgttagaagacaaattccctggtggcgaacatttagtttatggattaaaagatggtggcgttgacttaacagacggctatttaaacgacaaaacaaaagaagctgttaaaacagcaaaagataaagtaatctcaggtgacgtaaaagtcccagaaaaaccagaa

SEQ ID NO: 80 - protein, 339 aa
CGGGKGKTAESGGGKGDAAHSAVIITDTGGVDDKSFNQSSWEGLQAWGKEHDLPEGSKGYAYIQSNDAADYTTNIDQAVSSKFNTIFGIGYLLKDAISSAADANPDTNFVLIDDQIDGKKNVVSATFRDNEAAYLAGVAAANETKTNKVGFVGGEEGVVIDRFQAGFEKGVADAAKELGKEITVDTKYAASFADPAKGKALAAAMYQNGVDIIFHASGATGQGVFQEAKDLNESGSGDKVWVIGVDRDQDADGKYKTKDGKEDNFTLTSTLKGVGTAVQDIANRALEDKFPGGEHLVYGLKDGGVDLTDGYLNDKTKEAVKTAKDKVISGDVKVPEKPE

SEQ ID NO: 81 - DNA, 1680 bp; double-stranded, linear
taagagcataaaaaaatgaagagttataggagaaagaagatgaaaaagtatttaaaaatcacaatggtttgtattttattggtaggatttttagctgggtgtaccaataaaaatgaaaataaaaagaaacagaaaaataccaaagaagccgttcaactgatgtcaccctcggaattaacaacgctcaacacctctgtattattggattttccagatgctattgtccaaactgcagcgtttgaagggttatatagtttagatgaacaagaccaattggtaccagccgtagcaaaagcattgccgatgatttcagaagatggaaaaacctacacgatttctttgagaaaagaagcggtttggagtaacgatgatcctgtcacagcacatgattttgaatatgcttggaaaaaaatgattgatcctaaaaacggctttgtttatagcttcctcatcgttgaaacaattcaaaatggtgcagaaatctcagcggggaaattagcacccaatgaactaggtgtcacagctgtggatgattatacattaaaggtgacgctcaaagagccaaaaccgtactttacgtccttgttagcttttccgacatttttcccgcaaaatcnaaaagtagtcgaacaatttggtgcggactatggaactgctagtgataaagtcgtctataatggtccgttcgtggtaaaagattggcagcaaacaaagatggactggcaactagcaaaaaataatcgctattgggatcaccagaacgtgcgctcagacattatcaattatacagttatcaaagaaacatctaccgcattgaatctttttgaagatggacaattagatgtggctacactaagtggtgaactggcgcaacagaataaaaataatacgttgtatcattcgtatccaacagcgacaatgaactatttgcgcttaaatcaaaaacggnaagggcaagcnacgccgcttgcaaacgaaaacctgcgtaaagcattggctttaggaatagataaagaaaatctagtcaataatattattgcagatggttctaaagcgctacatggtgcgattacggaaggctttgtggcgaatcccacaacgggtctcgattttcgtcaagaagcaggtaatttaatggtttataacaaagaaaaagcgcaaagttattggaaaaaagcacaagcagaattaggagaaaaggttaacgttgaattgatggtaacagatgatggttcttacaaaaaaattggtgaaagtttgcaaggctcgctacaagaattgtttcctggtttgacaatagagctaaccgcattgccgactgaagctgcattgaactttgggcgagaaagtgactatgatttattcttaatttactggacaccagactatcaagaccctatttctaccctgatgactttatacaagggcaatgatcgcaattatcagaaccctgtctatgacaaattattagatgaagcagccacaacctatgccttagagccagaaaaaagatgggcgacactgattgcagctgaaaaagaagtgattgaaacgactgctggcatgattccacttagccaaaatgaacaaacagtcctgcaaaatgataaagtcaaaggcttgaattttcatacctttggcgctccattaacgttaaaaaatgtttataaggaaaaataa

SEQ ID NO: 82 - protein, 546 aa
MKKYLKITMVCILLVGFLAGCTNKNENKKKQKNTKEAVQLMSPSELTTLNTSVLLDFPDAIVQTAAFEGLYSLDEQDQLVPAVAKALPMISEDGKTYTISLRKEAVWSNDDPVTAHDFEYAWKKMIDPKNGFVYSFLIVETIQNGAEISAGKLAPNELGVTAVDDYTLKVTLKEPKPYFTSLLAFPTFFPQNXKVVEQFGADYGTASDKVVYNGPFVVKDWQQTKMDWQLAKNNRYWDHQNVRSDIINYTVIKETSTALNLFEDGQLDVATLSGELAQQNKNNTLYHSYPTATMNYLRLNQKRXGQATPLANENLRKALALGIDKENLVNNIIADGSKALHGAITEGFVANPTTGLDFRQEAGNLMVYNKEKAQSYWKKAQAELGEKVNVELMVTDDGSYKKIGESLQGSLQELFPGLTIELTALPTEAALNFGRESDYDLFLIYWTPDYQDPISTLMTLYKGNDRNYQNPVYDKLLDEAATTYALEPEKRWATLIAAEKEVIETTAGMIPLSQNEQTVLQNDKVKGLNFHTFGAPLTLKNVYKEK

SEQ ID NO: 83 - DNA, 1579 bp; double-stranded, linear
gtgtaccaataaaaatgaaaataaaaagaaacagaaaaataccaaagaagccgttcaactgatgtcaccctcggaattaacaacgctcaacacctctgtattattggattttccagatgctattgtccaaactgcagcgtttgaagggttatatagtttagatgaacaagaccaattggtaccagccgtagcaaaagcattgccgatgatttcagaagatggaaaaacctacacgatttctttgagaaaagaagcggtttggagtaacgatgatcctgtcacagcacatgattttgaatatgcttggaaaaaaatgattgatcctaaaaacggctttgtttatagcttcctcatcgttgaaacaattcaaaatggtgcagaaatctcagcggggaaattagcacccaatgaactaggtgtcacagctgtggatgattatacattaaaggtgacgctcaaagagccaaaaccgtactttacgtccttgttagcttttccgacatttttcccgcaaaatcnaaaagtagtcgaacaatttggtgcggactatggaactgctagtgataaagtcgtctataatggtccgttcgtggtaaaagattggcagcaaacaaagatggactggcaactagcaaaaaataatcgctattgggatcaccagaacgtgcgctcagacattatcaattatacagttatcaaagaaacatctaccgcattgaatctttttgaagatggacaattagatgtggctacactaagtggtgaactggcgcaacagaataaaaataatacgttgtatcattcgtatccaacagcgacaatgaactatttgcgcttaaatcaaaaacggnaagggcaagcnacgccgcttgcaaacgaaaacctgcgtaaagcattggctttaggaatagataaagaaaatctagtcaataatattattgcagatggttctaaagcgctacatggtgcgattacggaaggctttgtggcgaatcccacaacgggtctcgattttcgtcaagaagcaggtaatttaatggtttataacaaagaaaaagcgcaaagttattggaaaaaagcacaagcagaattaggagaaaaggttaacgttgaattgatggtaacagatgatggttcttacaaaaaaattggtgaaagtttgcaaggctcgctacaagaattgtttcctggtttgacaatagagctaaccgcattgccgactgaagctgcattgaactttgggcgagaaagtgactatgatttattcttaatttactggacaccagactatcaagaccctatttctaccctgatgactttatacaagggcaatgatcgcaattatcagaaccctgtctatgacaaattattagatgaagcagccacaacctatgccttagagccagaaaaaagatgggcgacactgattgcagctgaaaaagaagtgattgaaacgactgctggcatgattccacttagccaaaatgaacaaacagtcctgcaaaatgataaagtcaaaggcttgaattttcatacctttggcgctccattaacgttaaaaaatgtttataaggaaaaa

SEQ ID NO: 84 - protein, 526 aa
CTNKNENKKKQKNTKEAVQLMSPSELTTLNTSVLLDFPDAIVQTAAFEGLYSLDEQDQLVPAVAKALPMISEDGKTYTISLRKEAVWSNDDPVTAHDFEYAWKKMIDPKNGFVYSFLIVETIQNGAEISAGKLAPNELGVTAVDDYTLKVTLKEPKPYFTSLLAFPTFFPQNXKVVEQFGADYGTASDKVVYNGPFVVKDWQQTKMDWQLAKNNRYWDHQNVRSDIINYTVIKETSTALNLFEDGQLDVATLSGELAQQNKNNTLYHSYPTATMNYLRLNQKRXGQATPLANENLRKALALGIDKENLVNNIIADGSKALHGAITEGFVANPTTGLDFRQEAGNLMVYNKEKAQSYWKKAQAELGEKVNVELMVTDDGSYKKIGESLQGSLQELFPGLTIELTALPTEAALNFGRESDYDLFLIYWTPDYQDPISTLMTLYKGNDRNYQNPVYDKLLDEAATTYALEPEKRWATLIAAEKEVIETTAGMIPLSQNEQTVLQNDKVKGLNFHTFGAPLTLKNVYKEK

SEQ ID NO: 85 - DNA, 1680 bp; double-stranded, linear
taaaatggagggatcggtatgaagaaattaaaaatgttaggatgcgtcgggttgcttttagctttaacggcttgtcaggcgggaacgggaaactcggctgatagtaacaaagcagcggaacaaaaaattgcaattagttctgaagcggctatttcgacaatggaaccacacacagcgggggatacgacctcgactttagtcatgaatcaagtttatgaaggactctatgttttaggtaaagaagatgaattagagttgggggtcgctgccgaagaaccagcgatttctgaagatgaaaccgtttatacatttaagattagagaagatgccaaatggtcgaatgatgatccagtaacagcaaacgactttgtttatgcatggcaacaagttgcttcccctaaatcaggatcgattcatcaagctttattttttgatgtcattaaaaatgctaaggaaattgctttagaaggcgcagatgtgaatactcttggggttaaggcgctagatgataaaacgttagaaataactttagaacggcccaccccttatttgaaatcattactttcgtttcctgttttgtttccacaaaatgaaaaatatatcaaagaacaaggggataaatatgctactgatgcagaacatttgatttataatggtccttttaaattgaaagaatgggataatgcctcttctgatgactggacctacgaaaaaaatgatacgtattgggatgctgaaaaagttaaattaacagaagcgaaagtttcagtaattaagagcccaacgacagcggtgaatttgtttgactcgaatgaattggatgtagtgaataagctaagtggtgaatttattcctggttatgttgataatccagcctttctttcaattcctcaattcgtcacatactttttaaaaatgaacagcgttcgtgatggaaaagaaaatccggctttagcgaacaacaatattcgtaaagcgttggcacaagcttttgataaagaaagttttgtaaaagaagtcttgcaagatcaatcaacggctacagatcaagtaattccgccgggacaaacgattgcgccagatggaacagatttcacaaaactagctgctaagaaaaataactacttaacctacgatacagcgaaagcaaaagaattctgggaaaaagggaaaaaagaaattgggctggataaaatcaaattagaatttttaacagatgatacagacagcgccaaaaaagctgctgagtttttccaatttcaattggaagaaaatctagatggattagaagtgaatgttactcaagttccttttactattcgtgttgatcgtgatcaaacgagagactatgatttagaattatctggttggggaaccgattatcgtgatccattaacagttatgcgcatctttacttcggatagtaccttgggcggcgtaacgttcaagagtgatacgtatgatcaattaattcaagaaactagaacaacacatgcggctgatcaagaggctcgtttaaatgactttgctcaagcacaagatattttggtgaatcaggaaacggttttagcaccaatctacaatcgaagcatttctgtattagctaatcaaaaaatcaaggatctgtattggcattcatttggacccacgtacagtttaaaatgggcttatgttaactaa

SEQ ID NO: 86 - protein, 553 aa
MKKLKMLGCVGLLLALTACQAGTGNSADSNKAAEQKIAISSEAAISTMEPHTAGDTTSTLVMNQVYEGLYVLGKEDELELGVAAEEPAISEDETVYTFKIREDAKWSNDDPVTANDFVYAWQQVASPKSGSIHQALFFDVIKNAKEIALEGADVNTLGVKALDDKTLEITLERPTPYLKSLLSFPVLFPQNEKYIKEQGDKYATDAEHLIYNGPFKLKEWDNASSDDWTYEKNDTYWDAEKVKLTEAKVSVIKSPTTAVNLFDSNELDVVNKLSGEFIPGYVDNPAFLSIPQFVTYFLKMNSVRDGKENPALANNNIRKALAQAFDKESFVKEVLQDQSTATDQVIPPGQTIAPDGTDFTKLAAKKNNYLTYDTAKAKEFWEKGKKEIGLDKIKLEFLTDDTDSAKKAAEFFQFQLEENLDGLEVNVTQVPFTIRVDRDQTRDYDLELSGWGTDYRDPLTVMRIFTSDSTLGGVTFKSDTYDQLIQETRTTHAADQEARLNDFAQAQDILVNQETVLAPIYNRSISVLANQKIKDLYWHSFGPTYSLKWAYVN

SEQ ID NO: 87 - DNA, 1597 bp; double-stranded, linear
gggaacgggaaactcggctgatagtaacaaagcagcggaacaaaaaattgcaattagttctgaagcggctatttcgacaatggaaccacacacagcgggggatacgacctcgactttagtcatgaatcaagtttatgaaggactctatgttttaggtaaagaagatgaattagagttgggggtcgctgccgaagaaccagcgatttctgaagatgaaaccgtttatacatttaagattagagaagatgccaaatggtcgaatgatgatccagtaacagcaaacgactttgtttatgcatggcaacaagttgcttcccctaaatcaggatcgattcatcaagctttattttttgatgtcattaaaaatgctaaggaaattgctttagaaggcgcagatgtgaatactcttggggttaaggcgctagatgataaaacgttagaaataactttagaacggcccaccccttatttgaaatcattactttcgtttcctgttttgtttccacaaaatgaaaaatatatcaaagaacaaggggataaatatgctactgatgcagaacatttgatttataatggtccttttaaattgaaagaatgggataatgcctcttctgatgactggacctacgaaaaaaatgatacgtattgggatgctgaaaaagttaaattaacagaagcgaaagtttcagtaattaagagcccaacgacagcggtgaatttgtttgactcgaatgaattggatgtagtgaataagctaagtggtgaatttattcctggttatgttgataatccagcctttctttcaattcctcaattcgtcacatactttttaaaaatgaacagcgttcgtgatggaaaagaaaatccggctttagcgaacaacaatattcgtaaagcgttggcacaagcttttgataaagaaagttttgtaaaagaagtcttgcaagatcaatcaacggctacagatcaagtaattccgccgggacaaacgattgcgccagatggaacagatttcacaaaactagctgctaagaaaaataactacttaacctacgatacagcgaaagcaaaagaattctgggaaaaagggaaaaaagaaattgggctggataaaatcaaattagaatttttaacagatgatacagacagcgccaaaaaagctgctgagtttttccaatttcaattggaagaaaatctagatggattagaagtgaatgttactcaagttccttttactattcgtgttgatcgtgatcaaacgagagactatgatttagaattatctggttggggaaccgattatcgtgatccattaacagttatgcgcatctttacttcggatagtaccttgggcggcgtaacgttcaagagtgatacgtatgatcaattaattcaagaaactagaacaacacatgcggctgatcaagaggctcgtttaaatgactttgctcaagcacaagatattttggtgaatcaggaaacggttttagcaccaatctacaatcgaagcatttctgtattagctaatcaaaaaatcaaggatctgtattggcattcatttggacccacgtacagtttaaaatgggcttatgttaac

SEQ ID NO: 88 - protein, 532 aa
GTGNSADSNKAAEQKIAISSEAAISTMEPHTAGDTTSTLVMNQVYEGLYVLGKEDELELGVAAEEPAISEDETVYTFKIREDAKWSNDDPVTANDFVYAWQQVASPKSGSIHQALFFDVIKNAKEIALEGADVNTLGVKALDDKTLEITLERPTPYLKSLLSFPVLFPQNEKYIKEQGDKYATDAEHLIYNGPFKLKEWDNASSDDWTYEKNDTYWDAEKVKLTEAKVSVIKSPTTAVNLFDSNELDVVNKLSGEFIPGYVDNPAFLSIPQFVTYFLKMNSVRDGKENPALANNNIRKALAQAFDKESFVKEVLQDQSTATDQVIPPGQTIAPDGTDFTKLAAKKNNYLTYDTAKAKEFWEKGKKEIGLDKIKLEFLTDDTDSAKKAAEFFQFQLEENLDGLEVNVTQVPFTIRVDRDQTRDYDLELSGWGTDYRDPLTVMRIFTSDSTLGGVTFKSDTYDQLIQETRTTHAADQEARLNDFAQAQDILVNQETVLAPIYNRSISVLANQKIKDLYWHSFGPTYSLKWAYVN

SEQ ID NO: 89 - DNA, 429 bp; double-stranded, linear
taatggccgtttcgtctactaataaagaggatgaagctactcaaatggcgttggcaatggaacaaggatcataaaaaaggagaagtgagcatgaaaaaagtactaccttttattgccttagtcggcttgttattgttgtcaggttgtggaacagatatgaaaaagatattgactgccgatggtggtaaatggaaagtggaagaaacacgtgcaacttacactttttttgatgacggtaaattttcagctaatgactcagaggatagtgttagtgggacatacacttatgatgaaaaaaataaaaaaataacctttgacnttactagcagnaactctttcattatggaaaaagtngantncaangntancaagattacaggggaaattggcgaaaaacaaagaacacttataaaacaaaaaacagaataa

SEQ ID NO: 90 - protein, 112 aa
MKKVLPFIALVGLLLLSGCGTDMKKILTADGGKWKVEETRATYTFFDDGKFSANDSEDSVSGTYTYDEKNKKITFDXTSXNSFIMEKVXXXXXKITGEIGEKQRTLIKQKTE

SEQ ID NO: 91 - DNA, 259 bp; double-stranded, linear
attgactgccgatggtggtaaatggaaagtggaagaaacacgtgcaacttacactttttttgatgacggtaaattttcagctaatgactcagaggatagtgttagtgggacatacacttatgatgaaaaaaataaaaaaataacctttgacnttactagcagnaactctttcattatggaaaaagtngantncaangntancaagattacaggggaaattggcgaaaaacaaagaacacttataaaacaaaaaacagaa

SEQ ID NO: 92 - protein, 86 aa
LTADGGKWKVEETRATYTFFDDGKFSANDSEDSVSGTYTYDEKNKKITFDXTSXNSFIMEKVXXXXXKITGEIGEKQRTLIKQKTE

SEQ ID NO: 93 - DNA, 951 bp; double-stranded, linear
tgaatgaaacatattaaaggaatgttggtttttatcggattatttattttggttggttgtgcgccagatcaagagccaacgaaacaaacaacaagtggtccgcaagagacaaagcaagtgaagcaagttaccgtcaccaatcaaacgacttctgcggtggaaaaacaagcgccgactaaaaatgacgaactgattgctaatcaattgacttttgattctcatgaatacacgtacgaagtggttacaggggccacacaaacgacatttggaacaaccccaccagcaaaatatacaccggaagaaaaaaagaaaaaaatgttttggtccaatcaaccgcctttgggattaatgacgggtaactattataaaaatgaaggtgtatttactggcggaaattacggcattgtagagattattacggaacctgaaacgcaaaggattctgaatgttgagtttacagagtttgctagtgatccttattatgatacacgctattcgggtgtcaacaaacgcctgtcggattatcctgaatttcaagcaagcaacacgcgtacagacgatacgttagtcaccgttgttaatggtattacttatgtagaaaaacaaatgcgtgacgaaaatcgtgttacaggtaatttttatacggtacgcggttcatcaacttctgcgcgtgaaggattaatgcctttagcagcagagatggacacttggctaaaagagccatcgaaagaaacgtatatcggttacgcagaagatttaggcaatggcctaatcgctcgacttcaagtgataacagaagagcagaaaataaaacatgtcagctatgatgaatacttttcagatgaacaggaaaaaatcacagaaacagcctgcggcctttttatcgtcaatcgaaatattattcaccaggatacaataaacaaaccaacaattcttttattcattttgtag

SEQ ID NO: 94 - protein, 315 aa
MKHIKGMLVFIGLFILVGCAPDQEPTKQTTSGPQETKQVKQVTVTNQTTSAVEKQAPTKNDELIANQLTFDSHEYTYEVVTGATQTTFGTTPPAKYTPEEKKKKMFWSNQPPLGLMTGNYYKNEGVFTGGNYGIVEIITEPETQRILNVEFTEFASDPYYDTRYSGVNKRLSDYPEFQASNTRTDDTLVTVVNGITYVEKQMRDENRVTGNFYTVRGSSTSAREGLMPLAAEMDTWLKEPSKETYIGYAEDLGNGLIARLQVITEEQKIKHVSYDEYFSDEQEKITETACGLFIVNRNIIHQDTINKPTILLFIL

SEQ ID NO: 95 - DNA, 871 bp; double-stranded, linear
aacgaaacaaacaacaagtggtccgcaagagacaaagcaagtgaagcaagttaccgtcaccaatcaaacgacttctgcggtggaaaaacaagcgccgactaaaaatgacgaactgattgctaatcaattgacttttgattctcatgaatacacgtacgaagtggttacaggggccacacaaacgacatttggaacaaccccaccagcaaaatatacaccggaagaaaaaaagaaaaaaatgttttggtccaatcaaccgcctttgggattaatgacgggtaactattataaaaatgaaggtgtatttactggcggaaattacggcattgtagagattattacggaacctgaaacgcaaaggattctgaatgttgagtttacagagtttgctagtgatccttattatgatacacgctattcgggtgtcaacaaacgcctgtcggattatcctgaatttcaagcaagcaacacgcgtacagacgatacgttagtcaccgttgttaatggtattacttatgtagaaaaacaaatgcgtgacgaaaatcgtgttacaggtaatttttatacggtacgcggttcatcaacttctgcgcgtgaaggattaatgcctttagcagcagagatggacacttggctaaaagagccatcgaaagaaacgtatatcggttacgcagaagatttaggcaatggcctaatcgctcgacttcaagtgataacagaagagcagaaaataaaacatgtcagctatgatgaatacttttcagatgaacaggaaaaaatcacagaaacagcctgcggcctttttatcgtcaatcgaaatattattcaccaggatacaataaacaaaccaacaattcttttattcattttg

SEQ ID NO: 96 - protein, 290 aa
TKQTTSGPQETKQVKQVTVTNQTTSAVEKQAPTKNDELIANQLTFDSHEYTYEVVTGATQTTFGTTPPAKYTPEEKKKKMFWSNQPPLGLMTGNYYKNEGVFTGGNYGIVEIITEPETQRILNVEFTEFASDPYYDTRYSGVNKRLSDYPEFQASNTRTDDTLVTVVNGITYVEKQMRDENRVTGNFYTVRGSSTSAREGLMPLAAEMDTWLKEPSKETYIGYAEDLGNGLIARLQVITEEQKIKHVSYDEYFSDEQEKITETACGLFIVNRNIIHQDTINKPTILLFIL

SEQ ID NO: 97 - DNA, 648 bp; double-stranded, linear
tgagtgtatgattactcatttccctttgaatcagttatgataaaggaagaaataaataaattttttggagggattttcatgaaaatgtctaaagtactcaccactgttttgacggcaactgctgctcttgtgttgcttagtgcttgttcatctgataaaaaaacagatagtagttctagtagcaaagaaacagctaattcaagtacagaagtagtctctggtgcttcaattagtgccaagcctgaagagctcgaaatggcgttaagtgataaaggaaattggattgtcgcagctactgacaatgtcacttttgataaagaggtaacagttgctggtactttccatgataaggggaaagattccaacgatgtctatcgtaaattagcactttattcccaagatgataataaaaaagtaactgctgaatatgaaatcacggttcctaagctaatcgtttcttctgaaaatttcaacatcgttcacgggactgtcaaaggtgatattgaggtgaaagcaaatggctttactttaaatggtaccaaagttaatggcaatattacttttgataaacaagaatacaaagattctgctgacttagaaaaagatggtgccactgttactggtgaagtcaccgtagccaataattaa

SEQ ID NO: 98 - protein, 189 aa
MKMSKVLTTVLTATAALVLLSACSSDKKTDSSSSSKETANSSTEVVSGASISAKPEELEMALSDKGNWIVAATDNVTFDKEVTVAGTFHDKGKDSNDVYRKLALYSQDDNKKVTAEYEITVPKLIVSSENFNIVHGTVKGDIEVKANGFTLNGTKVNGNITFDKQEYKDSADLEKDGATVTGEVTVANN

SEQ ID NO: 99 - DNA, 484 bp; double-stranded, linear
aacagatagtagttctagtagcaaagaaacagctaattcaagtacagaagtagtctctggtgcttcaattagtgccaagcctgaagagctcgaaatggcgttaagtgataaaggaaattggattgtcgcagctactgacaatgtcacttttgataaagaggtaacagttgctggtactttccatgataaggggaaagattccaacgatgtctatcgtaaattagcactttattcccaagatgataataaaaaagtaactgctgaatatgaaatcacggttcctaagctaatcgtttcttctgaaaatttcaacatcgttcacgggactgtcaaaggtgatattgaggtgaaagcaaatggctttactttaaatggtaccaaagttaatggcaatattacttttgataaacaagaatacaaagattctgctgacttagaaaaagatggtgccactgttactggtgaagtcaccgtagccaataat

SEQ ID NO: 100 - protein, 161 aa
TDSSSSSKETANSSTEVVSGASISAKPEELEMALSDKGNWIVAATDNVTFDKEVTVAGTFHDKGKDSNDVYRKLALYSQDDNKKVTAEYEITVPKLIVSSENFNIVHGTVKGDIEVKANGFTLNGTKVNGNITFDKQEYKDSADLEKDGATVTGEVTVANN

SEQ ID NO: 101 - DNA, 1122 bp; double-stranded, linear
tttggtatgaaacagaaaaagtggttaatcggacttgttgcactgggcttggttttagcagcatgtggaagtggcggttcgaaaacgacctcaaacgaaccagctacacagaaaattaacgtcgcatctggtggtgaactctcgacattagacagcgctcattatacagatgtctatagttccgatatgattggtcaagtagttgaaggcttgtatcgacaagataaaaacggagatcctgagctagctatggcgaaagcagagccacaagttagtgaagacgggttagtctatacattcaagttacgagaagcaaaatggacaaacggggatccagttaaagcaggggattttgtagttgcgtttagaaacgtggtcgatccagcatacggttcaagtagcagtaatcaaatggatatttttaaaaatgggcgtgcggtgcgggaaggacaagccacgatggaagaatttggtgtcaaagcaatcgatgaccagacactagaactaacattggaaaatccaattccttatttagcccaagtcttggttgggacaccttttatgcctaaaaatgaagcctttgccaaagaaaaaggtactgcctatgggacttctgcagataattttgttggcaatgggccgtttgtaatttcaggttgggatggcaattccgaaacttggaaattgaagaagaatgatcattattgggataaagaacacgtaaaattgaatgaaattgatgttcaagtagtgaaagaaattggcacaggagccaatctttttgataatggcgacttagattacactgttttagcagatacttatgcacttcagtataaagagtcaaaacaagcgcattttgtacctaaagccatggtgggttatttaagccccaatcatcgccgtgaaattaccggcaacgaacatgttcgaaaagcttttttacaagcgattgacaaagaaacttttgcaaaagaaattttaggagatggctcgacagctttaaatggntttgtaccagctaattttgcaaaaatccagatacaggtgaagatttccgcaaagaaaatggtgatttattgccatataatattaaagaagcccaagctaactggaacaatt

SEQ ID NO: 102 - protein, 372 aa
MKQKKWLIGLVALGLVLAACGSGGSKTTSNEPATQKINVASGGELSTLDSAHYTDVYSSDMIGQVVEGLYRQDKNGDPELAMAKAEPQVSEDGLVYTFKLREAKWTNGDPVKAGDFVVAFRNVVDPAYGSSSSNQMDIFKNGRAVREGQATMEEFGVKAIDDQTLELTLENPIPYLAQVLVGTPFMPKNEAFAKEKGTAYGTSADNFVGNGPFVISGWDGNSETWKLKKNDHYWDKEHVKLNEIDVQVVKEIGTGANLFDNGDLDYTVLADTYALQYKESKQAHFVPKAMVGYLSPNHRREITGNEHVRKAFLQAIDKETFAKEILGDGSTALNGFVPANFAKIQIQVKISAKKMVIYCHIILKKPKLTGTI

SEQ ID NO: 103 - DNA, 1028 bp; double-stranded, linear
aacgacctcaaacgaaccagctacacagaaaattaacgtcgcatctggtggtgaactctcgacattagacagcgctcattatacagatgtctatagttccgatatgattggtcaagtagttgaaggcttgtatcgacaagataaaaacggagatcctgagctagctatggcgaaagcagagccacaagttagtgaagacgggttagtctatacattcaagttacgagaagcaaaatggacaaacggggatccagttaaagcaggggattttgtagttgcgtttagaaacgtggtcgatccagcatacggttcaagtagcagtaatcaaatggatatttttaaaaatgggcgtgcggtgcgggaaggacaagccacgatggaagaatttggtgtcaaagcaatcgatgaccagacactagaactaacattggaaaatccaattccttatttagcccaagtcttggttgggacaccttttatgcctaaaaatgaagcctttgccaaagaaaaaggtactgcctatgggacttctgcagataattttgttggcaatgggccgtttgtaatttcaggttgggatggcaattccgaaacttggaaattgaagaagaatgatcattattgggataaagaacacgtaaaattgaatgaaattgatgttcaagtagtgaaagaaattggcacaggagccaatctttttgataatggcgacttagattacactgttttagcagatacttatgcacttcagtataaagagtcaaaacaagcgcattttgtacctaaagccatggtgggttatttaagccccaatcatcgccgtgaaattaccggcaacgaacatgttcgaaaagcttttttacaagcgattgacaaagaaacttttgcaaaagaaattttaggagatggctcgacagctttaaatggntttgtaccagctaattttgcaaaaatccagatacaggtgaagatttccgcaaagaaaatggtgatttattgccatataatattaaagaagcccaagctaa

SEQ ID NO: 104 - protein, 342 aa
TTSNEPATQKINVASGGELSTLDSAHYTDVYSSDMIGQVVEGLYRQDKNGDPELAMAKAEPQVSEDGLVYTFKLREAKWTNGDPVKAGDFVVAFRNVVDPAYGSSSSNQMDIFKNGRAVREGQATMEEFGVKAIDDQTLELTLENPIPYLAQVLVGTPFMPKNEAFAKEKGTAYGTSADNFVGNGPFVISGWDGNSETWKLKKNDHYWDKEHVKLNEIDVQVVKEIGTGANLFDNGDLDYTVLADTYALQYKESKQAHFVPKAMVGYLSPNHRREITGNEHVRKAFLQAIDKETFAKEILGDGSTALNGFVPANFAKIQIQVKISAKKMVIYCHIILKKPKL

SEQ ID NO: 105 - DNA, 1116 bp; double-stranded, linear
taacagaagcaatacaacaacttaacactttgtttacttgttatttatcagaaatcaactaagacttgttatagtcaatgtatgggtagatatgaaggaggaaacaaggaaatgaagaaaagagctttgctaggggttaccttattaacattcacaacattagcgggttgtacaaatttatctgaacagaaaagcggcgaaaaacaaacagaggttgctgaagcgaaggcaactgaatctgaaaaagcatcagtaaaaaatgttatttttatgattggagatggcatggggaatccgtatacaacgggctatcgctatttcaaagccaatcactcagacaagcgtgttccccaaacagcttttgatacctatttggtcggacagcaagccacttatccagaagatgaagaagagaatgtcaccgattcagcttccgcagcgacagcgatggctgccggagtgaaaacctataataatgctattgcactcgataatgacaagtccaaaacagaaacagtgctcgaacgtgcgaaaaaagtggggaaatcaacgggtcttgtagcaacatctgaaataacacatgcaacccctgctgcatatggcgcacataatgtttcacgcaaaaatatggcagaaatcgccgatgactattttgatgatcaaatcgacggacaacacaaagtcgatgtgttacttggcggcggctccgaattatttgcccggaaagatcgtgatttagtcaaagaattttcccaagcgggttatggtcatgtcacagacaaaaagtcgttaaatgagaaccaagacgacaaaattttaggcttgtttgcaccaggcgggctacctaaaatgattgaccgaacggaagaagtcccttcattagctgatatgacagaagcggctcttcaacggttagataaaaatgaaaaaggtttctttttaatggttgaaggtagtcaaattgattgggccgggcatagcaatgatattgttggcgcgatgagcgaaatgcaagacttcgaagcggcgtttgaaaaggccatcgattttgccaaaaaagatggtgaacattggtggttacaactgcagatcattcaacagggggcttgtctttag

SEQ ID NO: 106 - protein, 334 aa
MKKRALLGVTLLTFTTLAGCTNLSEQKSGEKQTEVAEAKATESEKASVKNVIFMIGDGMGNPYTTGYRYFKANHSDKRVPQTAFDTYLVGQQATYPEDEEENVTDSASAATAMAAGVKTYNNAIALDNDKSKTETVLERAKKVGKSTGLVATSEITHATPAAYGAHNVSRKNMAEIADDYFDDQIDGQHKVDVLLGGGSELFARKDRDLVKEFSQAGYGHVTDKKSLNENQDDKILGLFAPGGLPKMIDRTEEVPSLADMTEAALQRLDKNEKGFFLMVEGSQIDWAGHSNDIVGAMSEMQDFEAAFEKAIDFAKKDGEHWWLQLQIIQQGACL

SEQ ID NO: 107 - DNA, 928 bp; double-stranded, linear
acagaaaagcggcgaaaaacaaacagaggttgctgaagcgaaggcaactgaatctgaaaaagcatcagtaaaaaatgttatttttatgattggagatggcatggggaatccgtatacaacgggctatcgctatttcaaagccaatcactcagacaagcgtgttccccaaacagcttttgatacctatttggtcggacagcaagccacttatccagaagatgaagaagagaatgtcaccgattcagcttccgcagcgacagcgatggctgccggagtgaaaacctataataatgctattgcactcgataatgacaagtccaaaacagaaacagtgctcgaacgtgcgaaaaaagtggggaaatcaacgggtcttgtagcaacatctgaaataacacatgcaacccctgctgcatatggcgcacataatgtttcacgcaaaaatatggcagaaatcgccgatgactattttgatgatcaaatcgacggacaacacaaagtcgatgtgttacttggcggcggctccgaattatttgcccggaaagatcgtgatttagtcaaagaattttcccaagcgggttatggtcatgtcacagacaaaaagtcgttaaatgagaaccaagacgacaaaattttaggcttgtttgcaccaggcgggctacctaaaatgattgaccgaacggaagaagtcccttcattagctgatatgacagaagcggctcttcaacggttagataaaaatgaaaaaggtttctttttaatggttgaaggtagtcaaattgattgggccgggcatagcaatgatattgttggcgcgatgagcgaaatgcaagacttcgaagcggcgtttgaaaaggccatcgattttgccaaaaaagatggtgaacattggtggttacaactgcagatcattcaacagggggcttgtctt

SEQ ID NO: 108 - protein, 309 aa
QKSGEKQTEVAEAKATESEKASVKNVIFMIGDGMGNPYTTGYRYFKANHSDKRVPQTAFDTYLVGQQATYPEDEEENVTDSASAATAMAAGVKTYNNAIALDNDKSKTETVLERAKKVGKSTGLVATSEITHATPAAYGAHNVSRKNMAEIADDYFDDQIDGQHKVDVLLGGGSELFARKDRDLVKEFSQAGYGHVTDKKSLNENQDDKILGLFAPGGLPKMIDRTEEVPSLADMTEAALQRLDKNEKGFFLMVEGSQIDWAGHSNDIVGAMSEMQDFEAAFEKAIDFAKKDGEHWWLQLQIIQQGACL

SEQ ID NO: 109 - DNA, 600 bp; double-stranded, linear
tgaaggagggagaaaatgaaaaagttaatcggtaaaaagtggctgctgcttacagcagtagccacttttttattatcaggatgcgcaagtcttgaacaaaaagcacaggatagtgtaaaagaagttactgaaaatgttactcaaactatttcaaacgatcaacgtataccagctgattttgttaggcacgtggatggcgataccacagtattaaaaattgacggaaaagaacaaaaagttcggtttttattaattgacacacccgagactgtgaaaccgaaaacaaaagttcagccgttcggattggaagctagcaaacgcacaaaagagcttttgtctactgcttcagaaattacgtttgaatatgataagggcgataaaacagatcgttacggacgagcgttgggctacatattcgtagatggaacattactacaaaaaacgcttgtaagtgaaggattagctcgtgttgcctatgtaaaagagcctacaactaagtatttggcagaactagagcaagcccaagaacaggctaaaaatgagtcactcggaatctggagcataccaggttatgtgacacaacgggggtttagtaaataa

SEQ ID NO: 110 - protein, 194 aa
MKKLIGKKWLLLTAVATFLLSGCASLEQKAQDSVKEVTENVTQTISNDQRIPADFVRHVDGDTTVLKIDGKEQKVRFLLIDTPETVKPKTKVQPFGLEASKRTKELLSTASEITFEYDKGDKTDRYGRALGYIFVDGTLLQKTLVSEGLARVAYVKEPTTKYLAELEQAQEQAKNESLGIWSIPGYVTQRGFSK

SEQ ID NO: 111 - DNA, 466 bp; double-stranded, linear
aaatgttactcaaactatttcaaacgatcaacgtataccagctgattttgttaggcacgtggatggcgataccacagtattaaaaattgacggaaaagaacaaaaagttcggtttttattaattgacacacccgagactgtgaaaccgaaaacaaaagttcagccgttcggattggaagctagcaaacgcacaaaagagcttttgtctactgcttcagaaattacgtttgaatatgataagggcgataaaacagatcgttacggacgagcgttgggctacatattcgtagatggaacattactacaaaaaacgcttgtaagtgaaggattagctcgtgttgcctatgtaaaagagcctacaactaagtatttggcagaactagagcaagcccaagaacaggctaaaaatgagtcactcggaatctggagcataccaggttatgtgacacaacgggggtttagtaaa

SEQ ID NO: 112 - protein, 155 aa
NVTQTISNDQRIPADFVRHVDGDTTVLKIDGKEQKVRFLLIDTPETVKPKTKVQPFGLEASKRTKELLSTASEITFEYDKGDKTDRYGRALGYIFVDGTLLQKTLVSEGLARVAYVKEPTTKYLAELEQAQEQAKNESLGIWSIPGYVTQRGFSK

SEQ ID NO: 113 - DNA, 1242 bp; double-stranded, linear
tgattgacacatagggggaatagtatgaaaaagttaaaaatgatggggattatgttatttgttagtacggtcttggtaggttgtggcacaacagcaganacaaaaatagacgagaaagcaactgagaaaaccagtgtctcgaaaaaagttttaaatttaatggagaactcggaaatcggttcaatggattctatttttacacaagatgaagccagtattaacgcacagtccaatgtctttgaagggttatatcaattggatgaaaaagatcaactaatacctgctgctgctaaagagatgccagaaatttctgaggatggcaaacgatataccattaaactaagagaagatggcaagtggtccaatggtgatgctgtaacagccaatgatttcgtttttgcttggcgtaaattagcgaatcccaaaaaccaagccaattactttttcttgttagaaggaacgattctgaacggaacagctattacaaaagaggaaaaagcaccagaggaattgggtgtcaaagcgcttgatgattatactttggaggttactttagaaaagcctgtaccatattttacgtcgttattggcattttctccatttttcccacaaaacgaagcattcgtgaaagaaaaaggacaagcctatggcacttctagtgaaatgattgtatctaatggtccgtttttaatgaaaaattgggatcagtcagcgatgtcgtgggattttgtgcgtaatccctactattacgataaagaaaaagtaaaatcagaaacgattcattttgaagttcttaaagaaaccaataccgtttataatttgtacgaatcaggtgaattagatgtggctgtcttaacaggagattttgctaaacaaaatcgagacaacccagactatgaagcaatcgaacggtcaaaagtctattccttacgtttaaaccaaaaaagaaacgaaaaaccatccatttttgcaaatgagaatgtccgcaaagctttagcttatgctttggataaaaaaagtttagtcgataatattttagcagatggctcaaaagaaatttatgggtacattccagaaaaatttgtatataacccagaaacgaatgaagattttcgtcaagaagcaggcgctcttgtcaaaacagacgccaaaaaagccaaagagtatttagataaagcaaaagcagagctaaacggagatgtagccattgaacttctttcaagagatggtgatagtgaccga

SEQ ID NO: 114 - protein, 406 aa
MKKLKMMGIMLFVSTVLVGCGTTAXTKIDEKATEKTSVSKKVLNLMENSEIGSMDSIFTQDEASINAQSNVFEGLYQLDEKDQLIPAAAKEMPEISEDGKRYTIKLREDGKWSNGDAVTANDFVFAWRKLANPKNQANYFFLLEGTILNGTAITKEEKAPEELGVKALDDYTLEVTLEKPVPYFTSLLAFSPFFPQNEAFVKEKGQAYGTSSEMIVSNGPFLMKNWDQSAMSWDFVRNPYYYDKEKVKSETIHFEVLKETNTVYNLYESGELDVAVLTGDFAKQNRDNPDYEAIERSKVYSLRLNQKRNEKPSIFANENVRKALAYALDKKSLVDNILADGSKEIYGYIPEKFVYNPETNEDFRQEAGALVKTDAKKAKEYLDKAKAELNGDVAIELLSRDGDSDR

SEQ ID NO: 115 - DNA, 1119 bp; double-stranded, linear
gagaaagcaactgagaaaaccagtgtctcgaaaaaagttttaaatttaatggagaactcggaaatcggttcaatggattctatttttacacaagatgaagccagtattaacgcacagtccaatgtctttgaagggttatatcaattggatgaaaaagatcaactaatacctgctgctgctaaagagatgccagaaatttctgaggatggcaaacgatataccattaaactaagagaagatggcaagtggtccaatggtgatgctgtaacagccaatgatttcgtttttgcttggcgtaaattagcgaatcccaaaaaccaagccaattactttttcttgttagaaggaacgattctgaacggaacagctattacaaaagaggaaaaagcaccagaggaattgggtgtcaaagcgcttgatgattatactttggaggttactttagaaaagcctgtaccatattttacgtcgttattggcattttctccatttttcccacaaaacgaagcattcgtgaaagaaaaaggacaagcctatggcacttctagtgaaatgattgtatctaatggtccgtttttaatgaaaaattgggatcagtcagcgatgtcgtgggattttgtgcgtaatccctactattacgataaagaaaaagtaaaatcagaaacgattcattttgaagttcttaaagaaaccaataccgtttataatttgtacgaatcaggtgaattagatgtggctgtcttaacaggagattttgctaaacaaaatcgagacaacccagactatgaagcaatcgaacggtcaaaagtctattccttacgtttaaaccaaaaaagaaacgaaaaaccatccatttttgcaaatgagaatgtccgcaaagctttagcttatgctttggataaaaaaagtttagtcgataatattttagcagatggctcaaaagaaatttatgggtacattccagaaaaatttgtatataacccagaaacgaatgaagattttcgtcaagaagcaggcgctcttgtcaaaacagacgccaaaaaagccaaagagtatttagataaagcaaaagcagagctaaacggagatgtagccattgaacttctttcaagagatggt

SEQ ID NO: 116 - protein, 373 aa
EKATEKTSVSKKVLNLMENSEIGSMDSIFTQDEASINAQSNVFEGLYQLDEKDQLIPAAAKEMPEISEDGKRYTIKLREDGKWSNGDAVTANDFVFAWRKLANPKNQANYFFLLEGTILNGTAITKEEKAPEELGVKALDDYTLEVTLEKPVPYFTSLLAFSPFFPQNEAFVKEKGQAYGTSSEMIVSNGPFLMKNWDQSAMSWDFVRNPYYYDKEKVKSETIHFEVLKETNTVYNLYESGELDVAVLTGDFAKQNRDNPDYEAIERSKVYSLRLNQKRNEKPSIFANENVRKALAYALDKKSLVDNILADGSKEIYGYIPEKFVYNPETNEDFRQEAGALVKTDAKKAKEYLDKAKAELNGDVAIELLSRDG

SEQ ID NO: 117 - DNA, 813 bp; double-stranded, linear
tgagaaattagttattttagaaaaataaaaaccattttggaggaagatttaaaaatgaaaaaacgcgtaattttagggacattagtcgctgcaacgttattaatgactgcttgtggaaacagcgaagcaactacgaaaagcgagagcaaaggtggaagtaatgctttagtcgtttcaactttcggattaagtgaagatattgtcaaaaaagacattatcgctccatttgaaaaagagaatgaagcgaaagttaccttagaagtaggcaatagcgcagaccgctttacgaaattaaaaaataatcccaatgcgggaattgatgtcattgaattagcacaagcaaatgcagcacaaggtggaaaagatgggttatttgaaaaaattacagaaaaagaagtacctaatttaagtcagttaacgccgggagcaaaagaggtttttgaaagtggtgctggcgtaccaatcgctgtaaacagtatcgggattgtttacaacaaagaaaaattaggcaaagaaattaaaaactgggatgacttatggtcagctgatttgaaaggtaaaatttctgttccagacgttgccacgacggcaggtcctttaatgttatacgttgctagtgaacatgctggtcaagatattacaaaagataacgggaaggccgcttttgaagcgatgaaagaattaaaaccaaacgttgttaaaacgtattcaaaatcgtcagacttagcnaatatgttccaatctggtgaaattgaagcagctgtggttgctgattttgcggttgatattattcaaggcgcacagaaaacgtga

SEQ ID NO: 118 - protein, 252 aa
MKKRVILGTLVAATLLMTACGNSEATTKSESKGGSNALVVSTFGLSEDIVKKDIIAPFEKENEAKVTLEVGNSADRFTKLKNNPNAGIDVIELAQANAAQGGKDGLFEKITEKEVPNLSQLTPGAKEVFESGAGVPIAVNSIGIVYNKEKLGKEIKNWDDLWSADLKGKISVPDVATTAGPLMLYVASEHAGQDITKDNGKAAFEAMKELKPNVVKTYSKSSDLANMFQSGEIEAAVVADFAVDIIQGAQKT

SEQ ID NO: 119 - DNA, 680 bp; double-stranded, linear
aactacgaaaagcgagagcaaaggtggaagtaatgctttagtcgtttcaactttcggattaagtgaagatattgtcaaaaaagacattatcgctccatttgaaaaagagaatgaagcgaaagttaccttagaagtaggcaatagcgcagaccgctttacgaaattaaaaaataatcccaatgcgggaattgatgtcattgaattagcacaagcaaatgcagcacaaggtggaaaagatgggttatttgaaaaaattacagaaaaagaagtacctaatttaagtcagttaacgccgggagcaaaagaggtttttgaaagtggtgctggcgtaccaatcgctgtaaacagtatcgggattgtttacaacaaagaaaaattaggcaaagaaattaaaaactgggatgacttatggtcagctgatttgaaaggtaaaatttctgttccagacgttgccacgacggcaggtcctttaatgttatacgttgctagtgaacatgctggtcaagatattacaaaagataacgggaaggccgcttttgaagcgatgaaagaattaaaaccaaacgttgttaaaacgtattcaaaatcgtcagacttagcnaatatgttccaatctggtgaaattgaagcagctgtggttgctgattttgcggttgatattattcaaggcgcacagaaaa

SEQ ID NO: 120 - protein, 226 aa
TTKSESKGGSNALVVSTFGLSEDIVKKDIIAPFEKENEAKVTLEVGNSADRFTKLKNNPNAGIDVIELAQANAAQGGKDGLFEKITEKEVPNLSQLTPGAKEVFESGAGVPIAVNSIGIVYNKEKLGKEIKNWDDLWSADLKGKISVPDVATTAGPLMLYVASEHAGQDITKDNGKAAFEAMKELKPNVVKTYSKSSDLANMFQSGEIEAAVVADFAVDIIQGAQK

SEQ ID NO: 121 - DNA, 765 bp; double-stranded, linear
tgaataaattatttaggaggaattatgatgaaaaaattaattagtttaggattggtttgtgtttgtggtatttcactacttactgcttgtncgggaaataatgataataaagatactgaaaagtcaaccagtcaatctagcagcacagttaaacaaccgaattcaaaagactttgttgcgtcaggggaatattcagttggaaaagatattgatcctggagattactatgctgtattaactcaactagatgataaatcgagcatagttcttattaccgtcaaatcaggcggagaaaatagtaaccatgacttatacggagtgggaaacaagaaaaaagtatctcttaaaaagggagatactctcacattcgaaactgccgacaaagattttgttgttagatttttaaatgaaaaagattttcaagaatatatgaaaaatccagtatcnagtactgaaactagcaaacanaaaacagtaaactctgatgtttctaaaagtagtagccaagataataaacaatctgatgtatctgaaaaaaaagaagtaagtactgaagcgaagtctgatgtagctactaatactttaccgagcgaagataaaaatactaatgacattactaagctagcagatgagccaaccttagaacaacaaaccgtcttagatactttagctaagcatcaatttaatgatatgtatccttataaaggaagcaaaatgcattcaattatcggcgtcatcccaaccatggacgcaaaaagatggtaa

SEQ ID NO: 122 - protein, 245 aa
MKKLISLGLVCVCGISLLTACXGNNDNKDTEKSTSQSSSTVKQPNSKDFVASGEYSVGKDIDPGDYYAVLTQLDDKSSIVLITVKSGGENSNHDLYGVGNKKKVSLKKGDTLTFETADKDFVVRFLNEKDFQEYMKNPVSSTETSKXKTVNSDVSKSSSQDNKQSDVSEKKEVSTEAKSDVATNTLPSEDKNTNDITKLADEPTLEQQTVLDTLAKHQFNDMYPYKGSKMHSIIGVIPTMDAKRW

SEQ ID NO: 123 - DNA, 664 bp; double-stranded, linear
taatgataataaagatactgaaaagtcaaccagtcaatctagcagcacagttaaacaaccgaattcaaaagactttgttgcgtcaggggaatattcagttggaaaagatattgatcctggagattactatgctgtattaactcaactagatgataaatcgagcatagttcttattaccgtcaaatcaggcggagaaaatagtaaccatgacttatacggagtgggaaacaagaaaaaagtatctcttaaaaagggagatactctcacattcgaaactgccgacaaagattttgttgttagatttttaaatgaaaaagattttcaagaatatatgaaaaatccagtatcnagtactgaaactagcaaacanaaaacagtaaactctgatgtttctaaaagtagtagccaagataataaacaatctgatgtatctgaaaaaaaagaagtaagtactgaagcgaagtctgatgtagctactaatactttaccgagcgaagataaaaatactaatgacattactaagctagcagatgagccaaccttagaacaacaaaccgtcttagatactttagctaagcatcaatttaatgatatgtatccttataaaggaagcaaaatgcattcaattatcggcgtcatcccaaccatggacgcaaaaagatgg

SEQ ID NO: 124 - protein, 221 aa
NDNKDTEKSTSQSSSTVKQPNSKDFVASGEYSVGKDIDPGDYYAVLTQLDDKSSIVLITVKSGGENSNHDLYGVGNKKKVSLKKGDTLTFETADKDFVVRFLNEKDFQEYMKNPVSSTETSKXKTVNSDVSKSSSQDNKQSDVSEKKEVSTEAKSDVATNTLPSEDKNTNDITKLADEPTLEQQTVLDTLAKHQFNDMYPYKGSKMHSIIGVIPTMDAKRW

SEQ ID NO: 125 - DNA, 675 bp; double-stranded, linear
tgactgctttttttctattggagaaaaaagtggtttttttgtattgttttgacgttgagacaaaggaggttcatttcagaaaattttccccaaaataaaatagacgaatgcgaggatgaaaaaatgaaaaaatttactttaacaatgatgactttaggtttagtagcaacacttggcttagcaggatgtggtaaacaggaaaagaaagcaactacctcttctgaaaaaacagaagtaacgttaccaaccaaagaccgtagcggcaaagaaattactttacccaaagaagcaaccaaaattatttccctagtgccatcaacaacagaagtgattgaagacttaggtaaaaccgaccaattaatcgcagttgatactcaaagtagtacaatgatgactgatttaaaaaaattaccacaaatggatatgatggctgtcgatgccgaaaaattgattgccttgaaaccacaaattgtttatgtgaatgacatcaatttagctagctcagaaagtgtttggaagcaagtggaagatgctggaattacagtcgttaatatccccactagtacaagcatcaaagcaatcaaagaagacgtccaattcatcgctgatagcttatctgaacatgaaaaaggacaaaagttaatcaaaacaatggatcaagaaatcgacgagtag

SEQ ID NO: 126 - protein, 183 aa
MKKFTLTMMTLGLVATLGLAGCGKQEKKATTSSEKTEVTLPTKDRSGKEITLPKEATKIISLVPSTTEVIEDLGKTDQLIAVDTQSSTMMTDLKKLPQMDMMAVDAEKLIALKPQIVYVNDINLASSESVWKQVEDAGITVVNIPTSTSIKAIKEDVQFIADSLSEHEKGQKLIKTMDQEIDE

SEQ ID NO: 127 - DNA, 460 bp; double-stranded, linear
ctcttctgaaaaaacagaagtaacgttaccaaccaaagaccgtagcggcaaagaaattactttacccaaagaagcaaccaaaattatttccctagtgccatcaacaacagaagtgattgaagacttaggtaaaaccgaccaattaatcgcagttgatactcaaagtagtacaatgatgactgatttaaaaaaattaccacaaatggatatgatggctgtcgatgccgaaaaattgattgccttgaaaccacaaattgtttatgtgaatgacatcaatttagctagctcagaaagtgtttggaagcaagtggaagatgctggaattacagtcgttaatatccccactagtacaagcatcaaagcaatcaaagaagacgtccaattcatcgctgatagcttatctgaacatgaaaaaggacaaaagttaatcaaaacaatggatcaagaaatcgacgagtag

SEQ ID NO: 128 - protein, 152 aa
SSEKTEVTLPTKDRSGKEITLPKEATKIISLVPSTTEVIEDLGKTDQLIAVDTQSSTMMTDLKKLPQMDMMAVDAEKLIALKPQIVYVNDINLASSESVWKQVEDAGITVVNIPTSTSIKAIKEDVQFIADSLSEHEKGQKLIKTMDQEIDE

SEQ ID NO: 129 - DNA, 432 bp; double-stranded, linear
taggagggagtaatcatgaaaaaaatcgggtattttagttgtattatttttttcatgtttttggtaggttgtagtaataacaaaaaagaaaacggcaatcttttgaatgccagttcgtttcctttaatactcaccacgattattgaaaaagaagaagacctaacgaaaggttcaatttttttcaacaaggataaaaccatgacgcttgaaaaagaatatttagttaatcccaataatgaagacacaaaaaaaacaagtagaacagaaaaaaaggtatataaaaatattaaaatacaagaaaataaagagagctatgaaattataggtcaattggacaaaaaaacgaaaaaaatagagtttaaaaaagttgatgaaggtaaacgtatatctgatgcagaaggtaatgtgtatggtgattttggtggtaaatag

SEQ ID NO: 130 - protein, 138 aa
MKKIGYFSCIIFFMFLVGCSNNKKENGNLLNASSFPLILTTIIEKEEDLTKGSIFFNKDKTMTLEKEYLVNPNNEDTKKTSRTEKKVYKNIKIQENKESYEIIGQLDKKTKKIEFKKVDEGKRISDAEGNVYGDFGGK

SEQ ID NO: 131 - DNA, 346 bp; double-stranded, linear
agaaaacggcaatcttttgaatgccagttcgtttcctttaatactcaccacgattattgaaaaagaagaagacctaacgaaaggttcaatttttttcaacaaggataaaaccatgacgcttgaaaaagaatatttagttaatcccaataatgaagacacaaaaaaaacaagtagaacagaaaaaaaggtatataaaaatattaaaatacaagaaaataaagagagctatgaaattataggtcaattggacaaaaaaacgaaaaaaatagagtttaaaaaagttgatgaaggtaaacgtatatctgatgcagaaggtaatgtgtatggtgattttggtggtaaatag

SEQ ID NO: 132 - protein, 115 aa
KENGNLLNASSFPLILTTIIEKEEDLTKGSIFFNKDKTMTLEKEYLVNPNNEDTKKTSRTEKKVYKNIKIQENKESYEIIGQLDKKTKKIEFKKVDEGKRISDAEGNVYGDFGGK

SEQ ID NO: 133 - DNA, 261 bp; double-stranded, linear
taaacgagaggtgagtttatgaaaacaaaaatcggaaaaacagttatcttgtcagcatttttattcacaagtttccttttactgagtggttgtacctcggctggcgaagagatggaaaaaacaattgatcgacagaaagaaaaagtcgataaaacggtcgataagcagaaacataaaaatgaaaattccatggaaagttacgacgaaaaagttgaccgttctttagatagtcaagaagacaaaatcgatactactgagtaa

SEQ ID NO: 134 - protein, 80 aa
MKTKIGKTVILSAFLFTSFLLLSGCTSAGEEMEKTIDRQKEKVDKTVDKQKHKNENSMESYDEKVDRSLDSQEDKIDTTE

SEQ ID NO: 135 - DNA, 148 bp; double-stranded, linear
gatggaaaaaacaattgatcgacagaaagaaaaagtcgataaaacggtcgataagcagaaacataaaaatgaaaattccatggaaagttacgacgaaaaagttgaccgttctttagatagtcaagaagacaaaatcgatactactgag

SEQ ID NO: 136 - protein, 49 aa
MEKTIDRQKEKVDKTVDKQKHKNENSMESYDEKVDRSLDSQEDKIDTTE

SEQ ID NO: 137 - DNA, 924 bp; double-stranded, linear
taattttcaagtcctacatataatggtaaaatagaatggattgaaattaattggaggaataatgaatcgatgaaaaaaagattgctattatttattggtttggcaagtatacttactttgacaggatgtgcaaaatggattgatcgtggtgaatccatcacagcggtaggctcatcagctttacaaccattagtagagacagcgagtgaggaatatcaaagccaaaatccgggaagatttattaatgtccaaggtggcggaagcggaacaggtctgagtcaagtccaatctggcgcggtagacattggtaattctgatttatttgcagaagagaaaaagggcatcaaagcggaagacttaattgatcataaagttgctgtcgttgggattacaccaatcgttaacaaaaatgtcggtgtcaaagatatctcaatggaaaatttaaagaaaatctttttaggtgaagtaacaaactggaaagaacttggcgggaaagaccaaaaaattgttattttgaatagagcggccggtagtggtacgcgtgcgacttttgaaaagtgggtcttgggagataaaacagccattcgtgcgcaagaacaagattccagcggcatggttcgttccattgtttctgatacaccaggagcgattagttataccgcattttcatatgttactgatgaagtagctacgttaagtattgatggtgttcagccaacagatgaaaatgtaatgaacaataaatggattatttggtcttatgaacacatgtacactcgtaaaaatccaagtgatttaaccaaagagtttttagactttatgttgtcagatgatatccaagaacgtgtgattggtcaattagggtatattcctgtttcgaaaatggaaattgaacgggattggcaaggaaatgtcattaaataa

SEQ ID NO: 138 - protein, 284 aa
MKKRLLLFIGLASILTLTGCAKWIDRGESITAVGSSALQPLVETASEEYQSQNPGRFINVQGGGSGTGLSQVQSGAVDIGNSDLFAEEKKGIKAEDLIDHKVAVVGITPIVNKNVGVKDISMENLKKIFLGEVTNWKELGGKDQKIVILNRAAGSGTRATFEKWVLGDKTAIRAQEQDSSGMVRSIVSDTPGAISYTAFSYVTDEVATLSIDGVQPTDENVMNNKWIIWSYEHMYTRKNPSDLTKEFLDFMLSDDIQERVIGQLGYIPVSKMEIERDWQGNVIK

SEQ ID NO: 139 - DNA, 784 bp; double-stranded, linear
gattgatcgtggtgaatccatcacagcggtaggctcatcagctttacaaccattagtagagacagcgagtgaggaatatcaaagccaaaatccgggaagatttattaatgtccaaggtggcggaagcggaacaggtctgagtcaagtccaatctggcgcggtagacattggtaattctgatttatttgcagaagagaaaaagggcatcaaagcggaagacttaattgatcataaagttgctgtcgttgggattacaccaatcgttaacaaaaatgtcggtgtcaaagatatctcaatggaaaatttaaagaaaatctttttaggtgaagtaacaaactggaaagaacttggcgggaaagaccaaaaaattgttattttgaatagagcggccggtagtggtacgcgtgcgacttttgaaaagtgggtcttgggagataaaacagccattcgtgcgcaagaacaagattccagcggcatggttcgttccattgtttctgatacaccaggagcgattagttataccgcattttcatatgttactgatgaagtagctacgttaagtattgatggtgttcagccaacagatgaaaatgtaatgaacaataaatggattatttggtcttatgaacacatgtacactcgtaaaaatccaagtgatttaaccaaagagtttttagactttatgttgtcagatgatatccaagaacgtgtgattggtcaattagggtatattcctgtttcgaaaatggaaattgaacgggattggcaaggaaatgtcattaaa

SEQ ID NO: 140 - protein, 261 aa
IDRGESITAVGSSALQPLVETASEEYQSQNPGRFINVQGGGSGTGLSQVQSGAVDIGNSDLFAEEKKGIKAEDLIDHKVAVVGITPIVNKNVGVKDISMENLKKIFLGEVTNWKELGGKDQKIVILNRAAGSGTRATFEKWVLGDKTAIRAQEQDSSGMVRSIVSDTPGAISYTAFSYVTDEVATLSIDGVQPTDENVMNNKWIIWSYEHMYTRKNPSDLTKEFLDFMLSDDIQERVIGQLGYIPVSKMEIERDWQGNVIK

SEQ ID NO: 141 - DNA, 644 bp; double-stranded, linear
tgagtgtatgattactcatttccctttgaatcagttatgataaaggaagaaataaataaattttttggagggattttcatgaaaatgtctaaagtactcaccactgttttgacggcaactgctgctcttgtgttgcttagtgcttgttcatctgataaaaaaacagatagtagttctagtagcaaagaaacagctaattcaagtacagaagtagtctctggtgcttcaattagtgccaagcctgaagagctcgaaatggcgttaagtgataaaggaaattggattgtcgcagctactgacaatgtcacttttgataaagaggtaacagttgctggtactttccatgataaggggaaagattccaacgatgtctatcgtaaattagcactttattcccaagatgataataaaaaagtaactgctgaatatgaaatcacggttcctaagctaatcgtttcttctgaaaatttcaacatcgttcacgggactgtcaaaggtgatattgaggtgaaagcaaatggctttactttaaatggtaccaaagttaatggcaatattacttttgataaacaagaatacaaagattctgctgacttagaaaaagatggtgccactgttactggtgaagtcaccgtagccaataa

SEQ ID NO: 142 - protein, 189 aa; identical to SEQ ID NO: 98

SEQ ID NO: 143 - DNA, 480 bp; double-stranded, linear
aacagatagtagttctagtagcaaagaaacagctaattcaagtacagaagtagtctctggtgcttcaattagtgccaagcctgaagagctcgaaatggcgttaagtgataaaggaaattggattgtcgcagctactgacaatgtcacttttgataaagaggtaacagttgctggtactttccatgataaggggaaagattccaacgatgtctatcgtaaattagcactttattcccaagatgataataaaaaagtaactgctgaatatgaaatcacggttcctaagctaatcgtttcttctgaaaatttcaacatcgttcacgggactgtcaaaggtgatattgaggtgaaagcaaatggctttactttaaatggtaccaaagttaatggcaatattacttttgataaacaagaatacaaagattctgctgacttagaaaaagatggtgccactgttactggtgaagtcaccgtagccaa

SEQ ID NO: 144 - protein, 161 aa; identical to SEQ ID NO: 100

SEQ ID NO: 145 - DNA, 441 bp; double-stranded, linear
taatggccatttcgtctactaataaagaggatgaagctactcaaatggcgttggcaatggaacaaggatcataaaaaaggagaagtgagcatgaaaaaagtactaccttttattgccttagtcggcttgttattgttgtcaggttgtggaacagatatgaaaaagatattgactgccgatggtggtaaatgggaactagaaaataaaagtccaactactacttacactttttttgatgatgaaactttttcgaggtataattcaaaaattagtgatagtggaacgtactcttacgatgaaaataataaaaaactcactttggatataaaaaataaagaacaattaataatggaaaatgttgaatataaagacggtaaattaaaaggtgaaattggaggcgagaaggactctgataaaaaatngaataagaggtgtctttga

SEQ ID NO: 146 - protein, 136 aa
MKLLKWRWQWNKDHKKGEVSMKKVLPFIALVGLLLLSGCGTDMKKILTADGGKWELENKSPTTTYTFFDDETFSRYNSKISDSGTYSYDENNKKLTLDIKNKEQLIMENVEYKDGKLKGEIGGEKDSDKKXNKRCL

SEQ ID NO: 147 - DNA, 298 bp; double-stranded, linear
ttgtggaacagatatgaaaaagatattgactgccgatggtggtaaatgggaactagaaaataaaagtccaactactacttacactttttttgatgatgaaactttttcgaggtataattcaaaaattagtgatagtggaacgtactcttacgatgaaaataataaaaaactcactttggatataaaaaataaagaacaattaataatggaaaatgttgaatataaagacggtaaattaaaaggtgaaattggaggcgagaaggactctgataaaaaatngaataagaggtgtctttga

SEQ ID NO: 148 - protein, 98 aa
CGTDMKKILTADGGKWELENKSPTTTYTFFDDETFSRYNSKISDSGTYSYDENNKKLTLDIKNKEQLIMENVEYKDGKLKGEIGGEKDSDKKXNKRCL

SEQ ID NO: 149 - DNA, 1014 bp; double-stranded, linear
taaatatatcaaaaagaaaaaaggggattaccaaccatgaaaaagaaaaaagtttttagtgcgcttaccttattaacctttagtacgttgttgattgcaggctgtgctggcggagccaactctgcaacagataaatcaagtgcagctagctcaagcactgcagtctctagttcagcagaagcagctaaagagcaatcaaaaggacaagaattaacagaaattttatccagtactgattggcaaggcacaaaagtttacgacaaaaatnataataatttaacagcagaaaatgctaattttattggtttagcaaaatatgatggtgaaacaggtttttatgaatttttcgacaaagaaacaggtgaaacccgtggcgatgaaggcacattctttgtgacagacgatggcgaaaagcgtatcttaatttcggatacacaaaactatcaagcggtggtcgatttaacggaagtgacgaaagataaatttacctataagcgaatgggtaaagataaagacgggaaagatgtagaagtctttgtagaacatatcccttattctgacgagaaattaacctttacgaacggccgtaaagatttagaaacagaaactggcaagattgttaccaatgaacctggggatgacattttaggggccacattatggaatggcacgaaagttttagatgaagacggtaacgatgttactgaagcaaataaaatgtttattagtttagcgaaatttgataataaaacaagtaaatatgaattctttgatttagaaacgggtaaaacacgtggagattttggttacttccaagtaattgataataacaaaatccgtgctcacgtttcaattggtgacaataaatatggagctgcattagaattaacagaattaaatgataaacgttttacgtatacacgaatgggtaaagacaacaatggcaaagaaattaaagtctttgtagaacatgaaccatatgaaggagactttacgccagacttcacgttctaa

SEQ ID NO: 150 - protein, 325 aa
MKKKKVFSALTLLTFSTLLIAGCAGGANSATDKSSAASSSTAVSSSAEAAKEQSKGQELTEILSSTDWQGTKVYDKNXNNLTAENANFIGLAKYDGETGFYEFFDKETGETRGDEGTFFVTDDGEKRILISDTQNYQAVVDLTEVTKDKFTYKRMGKDKDGKDVEVFVEHIPYSDEKLTFTNGRKDLETETGKIVTNEPGDDILGATLWNGTKVLDEDGNDVTEANKMFISLAKFDNKTSKYEFFDLETGKTRGDFGYFQVIDNNKIRAHVSIGDNKYGAALELTELNDKRFTYTRMGKDNNGKEIKVFVEHEPYEGDFTPDFTF

SEQ ID NO: 151 - DNA, 892 bp; double-stranded, linear
tgcaacagataaatcaagtgcagctagctcaagcactgcagtctctagttcagcagaagcagctaaagagcaatcaaaaggacaagaattaacagaaattttatccagtactgattggcaaggcacaaaagtttacgacaaaaatnataataatttaacagcagaaaatgctaattttattggtttagcaaaatatgatggtgaaacaggtttttatgaatttttcgacaaagaaacaggtgaaacccgtggcgatgaaggcacattctttgtgacagacgatggcgaaaagcgtatcttaatttcggatacacaaaactatcaagcggtggtcgatttaacggaagtgacgaaagataaatttacctataagcgaatgggtaaagataaagacgggaaagatgtagaagtctttgtagaacatatcccttattctgacgagaaattaacctttacgaacggccgtaaagatttagaaacagaaactggcaagattgttaccaatgaacctggggatgacattttaggggccacattatggaatggcacgaaagttttagatgaagacggtaacgatgttactgaagcaaataaaatgtttattagtttagcgaaatttgataataaaacaagtaaatatgaattctttgatttagaaacgggtaaaacacgtggagattttggttacttccaagtaattgataataacaaaatccgtgctcacgtttcaattggtgacaataaatatggagctgcattagaattaacagaattaaatgataaacgttttacgtatacacgaatgggtaaagacaacaatggcaaagaaattaaagtctttgtagaacatgaaccatatgaaggagactttacgccagacttcacgttctaa

SEQ ID NO: 152 - protein, 296 aa
ATDKSSAASSSTAVSSSAEAAKEQSKGQELTEILSSTDWQGTKVYDKNXNNLTAENANFIGLAKYDGETGFYEFFDKETGETRGDEGTFFVTDDGEKRILISDTQNYQAVVDLTEVTKDKFTYKRMGKDKDGKDVEVFVEHIPYSDEKLTFTNGRKDLETETGKIVTNEPGDDILGATLWNGTKVLDEDGNDVTEANKMFISLAKFDNKTSKYEFFDLETGKTRGDFGYFQVIDNNKIRAHVSIGDNKYGAALELTELNDKRFTYTRMGKDNNGKEIKVFVEHEPYEGDFTPDFTF

SEQ ID NO: 153 - DNA, 864 bp; double-stranded, linear
tagattagaaccactggagaaaaatctcatatttctctcgaggaaaggaagttgagcacaatgaacaaaaaaattttaatggggctattaagtgtcgtgaccattccattacttgctgcgtgtcaaggaggagaaacaccttccgcagcgtcaaaaaatagtcaaacggtgactactcaaagtagtgcaaaaactgaaagcaccagtacaacccgttcggtagctcaaacaacatcaaaagaggaagtgaaagaaccgatgaagacctatgaagtgggtgcgcttttagaagcagccaatcaacgagatacgaagaaggtcaaggaaattttacaagatactacttatcaagtggatgaagtcgacacagaaggcaacacaccgctcaatatcgctgttcacaataatgacattgagattgcaaaagcgttgattgatcggggtgccgatattaatctgcaaaacagcattagtgatagtccctatctttatgcgggagcgcaaggacgtacggagattttagcgtatatgttaaaacatgcgaccccagatttaaataagcataaccgttacggtggcaatgcgttaattccggcagctgaaaaaggacatattgacaatgtgaagctcttgttagaagatggacgagaagacatagatttccaaaatgactttggctatacagcattgattgaggcagtggggttacgtgaagggaaccaactttaccaagatattgtaaaattgttaatggaaaatggtgcggatcaatccattaaagacaattctggtcgaacagcaatggactatgccaatcaaaaaggttatacggaaattagtaaaattttagcacagtacaactaa

SEQ ID NO: 154 - protein, 267 aa
MNKKILMGLLSVVTIPLLAACQGGETPSAASKNSQTVTTQSSAKTESTSTTRSVAQTTSKEEVKEPMKTYEVGALLEAANQRDTKKVKEILQDTTYQVDEVDTEGNTPLNIAVHNNDIEIAKALIDRGADINLQNSISDSPYLYAGAQGRTEILAYMLKHATPDLNKHNRYGGNALIPAAEKGHIDNVKLLLEDGREDIDFQNDFGYTALIEAVGLREGNQLYQDIVKLLMENGADQSIKDNSGRTAMDYANQKGYTEISKILAQYN

SEQ ID NO: 155 - DNA, 715 bp; double-stranded, linear
agcgtcaaaaaatagtcaaacggtgactactcaaagtagtgcaaaaactgaaagcaccagtacaacccgttcggtagctcaaacaacatcaaaagaggaagtgaaagaaccgatgaagacctatgaagtgggtgcgcttttagaagcagccaatcaacgagatacgaagaaggtcaaggaaattttacaagatactacttatcaagtggatgaagtcgacacagaaggcaacacaccgctcaatatcgctgttcacaataatgacattgagattgcaaaagcgttgattgatcggggtgccgatattaatctgcaaaacagcattagtgatagtccctatctttatgcgggagcgcaaggacgtacggagattttagcgtatatgttaaaacatgcgaccccagatttaaataagcataaccgttacggtggcaatgcgttaattccggcagctgaaaaaggacatattgacaatgtgaagctcttgttagaagatggacgagaagacatagatttccaaaatgactttggctatacagcattgattgaggcagtggggttacgtgaagggaaccaactttaccaagatattgtaaaattgttaatggaaaatggtgcggatcaatccattaaagacaattctggtcgaacagcaatggactatgccaatcaaaaaggttatacggaaattagtaaaattttagcacagtacaac

SEQ ID NO: 156 - protein, 238 aa
ASKNSQTVTTQSSAKTESTSTTRSVAQTTSKEEVKEPMKTYEVGALLEAANQRDTKKVKEILQDTTYQVDEVDTEGNTPLNIAVHNNDIEIAKALIDRGADINLQNSISDSPYLYAGAQGRTEILAYMLKHATPDLNKHNRYGGNALIPAAEKGHIDNVKLLLEDGREDIDFQNDFGYTALIEAVGLREGNQLYQDIVKLLMENGADQSIKDNSGRTAMDYANQKGYTEISKILAQYN

SEQ ID NO: 157 - DNA, 1089 bp; double-stranded, linear
taattattaanttctgatttttcagaaaatacagattgcattattttaggaggcaacactatgaaattgaaaaagtcattaacattcggtgtgattacattatttagcgtaacaactttagcggcttgtggaggcggcggaacgtcagatagctcaagcgcgtctggtggcggtaaggcaagtggcgaacaagttttacgtgtcacagaacaacaagaaatgccaacagctgatttatcactagcaacagncagaattagttttattgcattaaataatgtatatgaaggaatttatcgtttagacaaagataacaaagtccaacctgcaggtgcagcggaaaaagcagaagtttctgaagatggactaacatacaaaattaaattaaataaagatgcaaaatggtcagacggtaaaccagtgactgctaatgactatgtttacggatggcaacgaacagttgatccagcgacagcttctgaatatgcttatctgtatgcctctgtaaaaaatggtgatgccattgctaaaggggaaaaagataaatcagaattaggaattaaagcagtcagtgatacagaattagaaatcactttagaaaaagcaacaccatactttgattacttattagctttcccatcattcttcccgcaacgtcaagacattgtggaaaaatatggtaaaaattatgcatcaaacagcgaaagtgctgtctacaatggtccattcgtcttagacggctttgatggtcctggtacagatacaaaatggtcattcaagaaaaacgatcaatattgggataaagatactgtgaaactggactcagtagatgtgaatgtcgtgaaagaatcaccaaccgcgttgaacttgttccaagatggacaaacagacgatgtcgttctttctggtgaattagcccaacaaatggccaatgacccagcttttgttagtcaaaaagaagcatcaacacaatatatggaactaaatcaacgtgatgaaaaatcaccatttagaaatgcgaacttacgtaaagcaatttcttactcaatcgaccgtaaagcgttagttgaatcaatccttaggggatgg

SEQ ID NO: 158 - protein, 343 aa
MKLKKSLTFGVITLFSVTTLAACGGGGTSDSSSASGGGKASGEQVLRVTEQQEMPTADLSLATXRISFIALNNVYEGIYRLDKDNKVQPAGAAEKAEVSEDGLTYKIKLNKDAKWSDGKPVTANDYVYGWQRTVDPATASEYAYLYASVKNGDAIAKGEKDKSELGIKAVSDTELEITLEKATPYFDYLLAFPSFFPQRQDIVEKYGKNYASNSESAVYNGPFVLDGFDGPGTDTKWSFKKNDQYWDKDTVKLDSVDVNVVKESPTALNLFQDGQTDDVVLSGELAQQMANDPAFVSQKEASTQYMELNQRDEKSPFRNANLRKAISYSIDRKALVESILRGW

SEQ ID NO: 159 - DNA, 964 bp; double-stranded, linear
ttgtggaggcggcggaacgtcagatagctcaagcgcgtctggtggcggtaaggcaagtggcgaacaagttttacgtgtcacagaacaacaagaaatgccaacagctgatttatcactagcaacagncagaattagttttattgcattaaataatgtatatgaaggaatttatcgtttagacaaagataacaaagtccaacctgcaggtgcagcggaaaaagcagaagtttctgaagatggactaacatacaaaattaaattaaataaagatgcaaaatggtcagacggtaaaccagtgactgctaatgactatgtttacggatggcaacgaacagttgatccagcgacagcttctgaatatgcttatctgtatgcctctgtaaaaaatggtgatgccattgctaaaggggaaaaagataaatcagaattaggaattaaagcagtcagtgatacagaattagaaatcactttagaaaaagcaacaccatactttgattacttattagctttcccatcattcttcccgcaacgtcaagacattgtggaaaaatatggtaaaaattatgcatcaaacagcgaaagtgctgtctacaatggtccattcgtcttagacggctttgatggtcctggtacagatacaaaatggtcattcaagaaaaacgatcaatattgggataaagatactgtgaaactggactcagtagatgtgaatgtcgtgaaagaatcaccaaccgcgttgaacttgttccaagatggacaaacagacgatgtcgttctttctggtgaattagcccaacaaatggccaatgacccagcttttgttagtcaaaaagaagcatcaacacaatatatggaactaaatcaacgtgatgaaaaatcaccatttagaaatgcgaacttacgtaaagcaatttcttactcaatcgaccgtaaagcgttagttgaatcaatccttaggggatgg

SEQ ID NO: 160 - protein, 321 aa
CGGGGTSDSSSASGGGKASGEQVLRVTEQQEMPTADLSLATXRISFIALNNVYEGIYRLDKDNKVQPAGAAEKAEVSEDGLTYKIKLNKDAKWSDGKPVTANDYVYGWQRTVDPATASEYAYLYASVKNGDAIAKGEKDKSELGIKAVSDTELEITLEKATPYFDYLLAFPSFFPQRQDIVEKYGKNYASNSESAVYNGPFVLDGFDGPGTDTKWSFKKNDQYWDKDTVKLDSVDVNVVKESPTALNLFQDGQTDDVVLSGELAQQMANDPAFVSQKEASTQYMELNQRDEKSPFRNANLRKAISYSIDRKALVESILRGW

SEQ ID NO: 161 - DNA, 732 bp; double-stranded, linear
taagataaaattagttatagcgtctataggaggaatagtatgaaaaaattagtttgtgttattttagttatttttttaacaggttgtagttctcaaaaagcgaatgaacctaaaaaacaagaaaattctaccaatcatacaacatcaataaaaagcagtactaatcattacagttctagcatagaaacaagctctaataataaactaaaagaaacttcagaaagtgccagcaccactcaaacttcgtcaaagtcgaaaaatgaagtatctacaaatgtcgaagaagcaaattctttagaagcaacaccttatgctgtcgatcttagtagcttaaacaatccactcgtatttaattttaaaggaatgaatgtgccaacttcaattacgttagagaacttaaattcaacaccaactgctaccttccgaactaaattgtttggggctgaaaatggtcaagtgaaagaagccattaataaatatgagctatctataaatacaattcctacaaaagagattagaatattttcagcggccgataacagtattcgcaccgttaaagtaaatacagaattaattttaggaactaatatttcttcaaacgatgaacaaaatagatcgggcactttatacttattcaacaataaaaatggttcgatatctttaatcactcctaactacgctggcaatgttacggatgatcaaaaagacgttatgctagaagtaattcaataa

SEQ ID NO: 162 - protein, 230 aa
MKKLVCVILVIFLTGCSSQKANEPKKQENSTNHTTSIKSSTNHYSSSIETSSNNKLKETSESASTTQTSSKSKNEVSTNVEEANSLEATPYAVDLSSLNNPLVFNFKGMNVPTSITLENLNSTPTATFRTKLFGAENGQVKEAINKYELSINTIPTKEIRIFSAADNSIRTVKVNTELILGTNISSNDEQNRSGTLYLFNNKNGSISLITPNYAGNVTDDQKDVMLEVIQ

SEQ ID NO: 163 - DNA, 646 bp; double-stranded, linear
ttgtagttctcaaaaagcgaatgaacctaaaaaacaagaaaattctaccaatcatacaacatcaataaaaagcagtactaatcattacagttctagcatagaaacaagctctaataataaactaaaagaaacttcagaaagtgccagcaccactcaaacttcgtcaaagtcgaaaaatgaagtatctacaaatgtcgaagaagcaaattctttagaagcaacaccttatgctgtcgatcttagtagcttaaacaatccactcgtatttaattttaaaggaatgaatgtgccaacttcaattacgttagagaacttaaattcaacaccaactgctaccttccgaactaaattgtttggggctgaaaatggtcaagtgaaagaagccattaataaatatgagctatctataaatacaattcctacaaaagagattagaatattttcagcggccgataacagtattcgcaccgttaaagtaaatacagaattaattttaggaactaatatttcttcaaacgatgaacaaaatagatcgggcactttatacttattcaacaataaaaatggttcgatatctttaatcactcctaactacgctggcaatgttacggatgatcaaaaagacgttatgctagaagtaattcaa

SEQ ID NO: 164 - protein, 215 aa
CSSQKANEPKKQENSTNHTTSIKSSTNHYSSSIETSSNNKLKETSESASTTQTSSKSKNEVSTNVEEANSLEATPYAVDLSSLNNPLVFNFKGMNVPTSITLENLNSTPTATFRTKLFGAENGQVKEAINKYELSINTIPTKEIRIFSAADNSIRTVKVNTELILGTNISSNDEQNRSGTLYLFNNKNGSISLITPNYAGNVTDDQKDVMLEVIQ

SEQ ID NO: 165 - DNA, 1809 bp; double-stranded, linear
tagccaaaaaatgagggaggaaaagagatgaacaagaaacggattttaggtgcaatcacgttagcttctgtgttagtattcgggttagctgcatgtggtggcggcaataaaggcgggggcaataaagcaacggaaacagaagacatttcaaaaatgccaatcgctgttaaaaatgataaaaaagcaattgatggcggtacattagatgtcgctgtagttatggatacacaattccaaggacttttccagcaagaattttatcaagacaactatgatgcacaatacatgcttccaacggtacagccattatttaacaatgatgcagactttaagattgtcgatgggggtcctgcggatctgaaattagatgaagatgccaatacagcaaccattaaattacgtgacaatttgaaatggtctgacggtaaagatgtgacagccgatgacgtgattttctcttatgaagtcattggtcataaagactatacagggattcgttatgatgataactttacgaatattgttggcatggaagactaccatgatggtaaatcgccaaccatttctggcatagaaaaagtcaatgataaagaagttaaaatcacttataaagaagttcacccaggaatgcaacaattaggtggcggtgtttggggctcagttttaccaaaacatgcctttgaaggaattgctgttaaagacatggaatcaagcgatgcagttcgtaaaaaccctgtgactattggaccatactacatgagtaatattgtgacaggtgaatctgttgaatacctaccaaatgagcattactacggtggtaaacctaaattagataaattagtgttcaaatctgttccttctgcgagcattgtagaagcgatgaaagcgaaacaatacgatattgcattatcaatgccaacagatacgtatccaacatacaaagatactgaagggtatcaaatcttaggacgtcccgaacaagcctacacgtatattggctttaaaatgggtacgtttgacaaagaaacaaatacagtgaaatacaatccaaaagctaaaatggcagataaaagcttacgtcaagccatgggctatgcaattgacaatgatgcagtcggccaaaaattctacaacggcttacgaacaggggcaacaacgttaatcccaccagtcttcaagagcttgcatgatagcgaagcgaaaggctatacgcttgatttagacaaagcgaaaaaattattagacgatgctggttataaagacgtagacggcgatggcattcgcgaagacaaagaaggcaaaccactagaaatcaagtttgcttcaatgtcaggcggcgaaactgcacaaccacttgctgattactatgtccaacaatggaaagaaattggcttaaacgtaacgtatacaacaggacgcttaattgatttccaagcattctatgataaattgaaaaatgatgacccagaagtagatatctatcaaggcgcgtggggcacaggttcagatccttcaccaaccggcttatatggtccaaactcagcctttaactatacacgttttgagtcagaagaaaatactaaattacttgatgcgattgattcaaaagcatcatttgatgaagaaaaacgtaaaaaagccttctacgattggcaagagtatgccattgatgaagcgtttgtaatcccaacgctttacagaaatgaagtcttgcctgtcaacgaccgtgtagttgactttacttgggcagttgatacgaaagataatccatgggcaacggtgggtgtcacagcagactcacggaaataa

SEQ ID NO: 166 - protein, 593 aa
MNKKRILGAITLASVLVFGLAACGGGNKGGGNKATETEDISKMPIAVKNDKKAIDGGTLDVAVVMDTQFQGLFQQEFYQDNYDAQYMLPTVQPLFNNDADFKIVDGGPADLKLDEDANTATIKLRDNLKWSDGKDVTADDVIFSYEVIGHKDYTGIRYDDNFTNIVGMEDYHDGKSPTISGIEKVNDKEVKITYKEVHPGMQQLGGGVWGSVLPKHAFEGIAVKDMESSDAVRKNPVTIGPYYMSNIVTGESVEYLPNEHYYGGKPKLDKLVFKSVPSASIVEAMKAKQYDIALSMPTDTYPTYKDTEGYQILGRPEQAYTYIGFKMGTFDKETNTVKYNPKAKMADKSLRQAMGYAIDNDAVGQKFYNGLRTGATTLIPPVFKSLHDSEAKGYTLDLDKAKKLLDDAGYKDVDGDGIREDKEGKPLEIKFASMSGGETAQPLADYYVQQWKEIGLNVTYTTGRLIDFQAFYDKLKNDDPEVDIYQGAWGTGSDPSPTGLYGPNSAFNYTRFESEENTKLLDAIDSKASFDEEKRKKAFYDWQEYAIDEAFVIPTLYRNEVLPVNDRVVDFTWAVDTKDNPWATVGVTADSRK

SEQ ID NO: 167 - DNA, 1714 bp; double-stranded, linear
atgtggtggcggcaataaaggcgggggcaataaagcaacggaaacagaagacatttcaaaaatgccaatcgctgttaaaaatgataaaaaagcaattgatggcggtacattagatgtcgctgtagttatggatacacaattccaaggacttttccagcaagaattttatcaagacaactatgatgcacaatacatgcttccaacggtacagccattatttaacaatgatgcagactttaagattgtcgatgggggtcctgcggatctgaaattagatgaagatgccaatacagcaaccattaaattacgtgacaatttgaaatggtctgacggtaaagatgtgacagccgatgacgtgattttctcttatgaagtcattggtcataaagactatacagggattcgttatgatgataactttacgaatattgttggcatggaagactaccatgatggtaaatcgccaaccatttctggcatagaaaaagtcaatgataaagaagttaaaatcacttataaagaagttcacccaggaatgcaacaattaggtggcggtgtttggggctcagttttaccaaaacatgcctttgaaggaattgctgttaaagacatggaatcaagcgatgcagttcgtaaaaaccctgtgactattggaccatactacatgagtaatattgtgacaggtgaatctgttgaatacctaccaaatgagcattactacggtggtaaacctaaattagataaattagtgttcaaatctgttccttctgcgagcattgtagaagcgatgaaagcgaaacaatacgatattgcattatcaatgccaacagatacgtatccaacatacaaagatactgaagggtatcaaatcttaggacgtcccgaacaagcctacacgtatattggctttaaaatgggtacgtttgacaaagaaacaaatacagtgaaatacaatccaaaagctaaaatggcagataaaagcttacgtcaagccatgggctatgcaattgacaatgatgcagtcggccaaaaattctacaacggcttacgaacaggggcaacaacgttaatcccaccagtcttcaagagcttgcatgatagcgaagcgaaaggctatacgcttgatttagacaaagcgaaaaaattattagacgatgctggttataaagacgtagacggcgatggcattcgcgaagacaaagaaggcaaaccactagaaatcaagtttgcttcaatgtcaggcggcgaaactgcacaaccacttgctgattactatgtccaacaatggaaagaaattggcttaaacgtaacgtatacaacaggacgcttaattgatttccaagcattctatgataaattgaaaaatgatgacccagaagtagatatctatcaaggcgcgtggggcacaggttcagatccttcaccaaccggcttatatggtccaaactcagcctttaactatacacgttttgagtcagaagaaaatactaaattacttgatgcgattgattcaaaagcatcatttgatgaagaaaaacgtaaaaaagccttctacgattggcaagagtatgccattgatgaagcgtttgtaatcccaacgctttacagaaatgaagtcttgcctgtcaacgaccgtgtagttgactttacttgggcagttgatacgaaagataatccatgggcaacggtgggtgtcacagcagactcacggaaa

SEQ ID NO: 168 - protein, 571 aa
CGGGNKGGGNKATETEDISKMPIAVKNDKKAIDGGTLDVAVVMDTQFQGLFQQEFYQDNYDAQYMLPTVQPLFNNDADFKIVDGGPADLKLDEDANTATIKLRDNLKWSDGKDVTADDVIFSYEVIGHKDYTGIRYDDNFTNIVGMEDYHDGKSPTISGIEKVNDKEVKITYKEVHPGMQQLGGGVWGSVLPKHAFEGIAVKDMESSDAVRKNPVTIGPYYMSNIVTGESVEYLPNEHYYGGKPKLDKLVFKSVPSASIVEAMKAKQYDIALSMPTDTYPTYKDTEGYQILGRPEQAYTYIGFKMGTFDKETNTVKYNPKAKMADKSLRQAMGYAIDNDAVGQKFYNGLRTGATTLIPPVFKSLHDSEAKGYTLDLDKAKKLLDDAGYKDVDGDGIREDKEGKPLEIKFASMSGGETAQPLADYYVQQWKEIGLNVTYTTGRLIDFQAFYDKLKNDDPEVDIYQGAWGTGSDPSPTGLYGPNSAFNYTRFESEENTKLLDAIDSKASFDEEKRKKAFYDWQEYAIDEAFVIPTLYRNEVLPVNDRVVDFTWAVDTKDNPWATVGVTADSRK

SEQ ID NO: 169 - DNA, 378 bp; double-stranded, linear
taggaggatataatgaaaaaaaaacttattgtactattgttagccttatttttaacggcatgtagtaataatactgggggaaaaaatagcgacgcttcatctactgaagtatcaactaagcagcaaactacccagtcttctaaaaaagatagtagtaatccggacacaacaccaacttctacatcatctataacaattgaaacaaccgagaatttaaagaatagagaattgaatccaacagatgatgtttcaaaaactagacgacaattgtatgaacaaggaattaacagttcaacaattacggataaagaactaaaggaatatatatcagaggctaaagaacaaaagaaagatgtcattaattatattaagcaaaaa

SEQ ID NO: 170 - protein, 122 aa
MKKKLIVLLLALFLTACSNNTGGKNSDASSTEVSTKQQTTQSSKKDSSNPDTTPTSTSSITIETTENLKNRELNPTDDVSKTRRQLYEQGINSSTITDKELKEYISEAKEQKKDVINYIKQK

SEQ ID NO: 171 - DNA, 319 bp; double-stranded, linear
atgtagtaataatactgggggaaaaaatagcgacgcttcatctactgaagtatcaactaagcagcaaactacccagtcttctaaaaaagatagtagtaatccggacacaacaccaacttctacatcatctataacaattgaaacaaccgagaatttaaagaatagagaattgaatccaacagatgatgtttcaaaaactagacgacaattgtatgaacaaggaattaacagttcaacaattacggataaagaactaaaggaatatatatcagaggctaaagaacaaaagaaagatgtcattaattatattaagcaaaaa

SEQ ID NO: 172 - protein, 106 aa
CSNNTGGKNSDASSTEVSTKQQTTQSSKKDSSNPDTTPTSTSSITIETTENLKNRELNPTDDVSKTRRQLYEQGINSSTITDKELKEYISEAKEQKKDVINYIKQK

SEQ ID NO: 173 - DNA, 942 bp; double-stranded, linear
tagggaaaacaaggaggaattcttatgaaaaagatagggcttatttctagtgcttttcttttaacccttgctttagcagcatgcggcggcggaaaaagtacagaaaatacggatagtcgttccagtgctgcggaaagtaccacagtcgagagtacaaaagcatctgctacaaaagaatcaagtagcaaagcaacaacaaaatctagtgatgcgaaaccgtcaggaacaacaacagctgattcgaaagcaacagcttcttctacgaaggaagcggcaaataatggctcagcagagaagcaatcaccagcgaaaaatgcgaatccagatgaccaagccaaccaagtgcttaaccagctagcaaacatgtttcctggtcaaggcttaccgcaggcaattttaacgagtcaaacgaataactttttaactgcagcgacaacttcacaagcggatcaaaacaatttccgtgttttatattatgcagaaaaagaagcgattccagtgaatgatgcacgtgtcaatcagttaacgccaattagttcttttgagaaaaaaacatatggctctgatgccgaagcaaaaaatgcagtgaaccaaatcattgacaatggcggtcaaccagtagatttaggttacaatattactgggtataaacaaggggcggcaggttctagttacttatcttggcaagaaggcaattggagtttagtcgtacgggcctcaaatatcaatggtgaatcgcctgatgatttagcgaaaaatgttgtcaacattttggaacaagaaacattaccagcaccgaataccgttggtcaaatcacactgaacgtggcaggaaccactgactataatcgaaactcagtagtttggcaagccggtacagtcgtttactctgtccatcattttgacccaattcaagcagtgaagatggcaacatcaatgtaa

SEQ ID NO: 174 - protein, 305 aa
MKKIGLISSAFLLTLALAACGGGKSTENTDSRSSAAESTTVESTKASATKESSSKATTKSSDAKPSGTTTADSKATASSTKEAANNGSAEKQSPAKNANPDDQANQVLNQLANMFPGQGLPQAILTSQTNNFLTAATTSQADQNNFRVLYYAEKEAIPVNDARVNQLTPISSFEKKTYGSDAEAKNAVNQIIDNGGQPVDLGYNITGYKQGAAGSSYLSWQEGNWSLVVRASNINGESPDDLAKNVVNILEQETLPAPNTVGQITLNVAGTTDYNRNSVVWQAGTVVYSVHHFDPIQAVKMATSM

SEQ ID NO: 175 - DNA, 862 bp; double-stranded, linear
atgcggcggcggaaaaagtacagaaaatacggatagtcgttccagtgctgcggaaagtaccacagtcgagagtacaaaagcatctgctacaaaagaatcaagtagcaaagcaacaacaaaatctagtgatgcgaaaccgtcaggaacaacaacagctgattcgaaagcaacagcttcttctacgaaggaagcggcaaataatggctcagcagagaagcaatcaccagcgaaaaatgcgaatccagatgaccaagccaaccaagtgcttaaccagctagcaaacatgtttcctggtcaaggcttaccgcaggcaattttaacgagtcaaacgaataactttttaactgcagcgacaacttcacaagcggatcaaaacaatttccgtgttttatattatgcagaaaaagaagcgattccagtgaatgatgcacgtgtcaatcagttaacgccaattagttcttttgagaaaaaaacatatggctctgatgccgaagcaaaaaatgcagtgaaccaaatcattgacaatggcggtcaaccagtagatttaggttacaatattactgggtataaacaaggggcggcaggttctagttacttatcttggcaagaaggcaattggagtttagtcgtacgggcctcaaatatcaatggtgaatcgcctgatgatttagcgaaaaatgttgtcaacattttggaacaagaaacattaccagcaccgaataccgttggtcaaatcacactgaacgtggcaggaaccactgactataatcgaaactcagtagtttggcaagccggtacagtcgtttactctgtccatcattttgacccaattcaagcagtgaagatggcaacatcaatgtaa

SEQ ID NO: 176 - protein, 286 aa
CGGGKSTENTDSRSSAAESTTVESTKASATKESSSKATTKSSDAKPSGTTTADSKATASSTKEAANNGSAEKQSPAKNANPDDQANQVLNQLANMFPGQGLPQAILTSQTNNFLTAATTSQADQNNFRVLYYAEKEAIPVNDARVNQLTPISSFEKKTYGSDAEAKNAVNQIIDNGGQPVDLGYNITGYKQGAAGSSYLSWQEGNWSLVVRASNINGESPDDLAKNVVNILEQETLPAPNTVGQITLNVAGTTDYNRNSVVWQAGTVVYSVHHFDPIQAVKMATSM

SEQ ID NO: 177 - DNA, 1023 bp; double-stranded, linear
taaggagaaaagttcatgaaaaaaagaaaggttttatttacagcagttatggtattggcaggattacagttgctaagtggttgcggcaaaacagaagcttcggcaaatgatacggtagtcttgcgctatgcgtatgctagtaatagccaaccagttatcgattctatgaagaaattcggtgaattagtagaggaaaaaacagatggtaaagttcaaattgaatattttccagatggtcaattaggaggagaaacagaactaattgaattaacacaaacaggtgcaattgattttgcaaaggtcagtggatcagcattagaaagtttttctaaagattattctgtatttgccattccgtatatttttgataatgaaaaacatttttttaaagtaatggataatcaagcgctaatgcaaccagtgtatgattctacaaaaaaattaggatttgttggtttaacttattatgactctggtcaacgaagtttttatatgagcaaagggcctgttacatctccagatgatttgaaaggtaaaaaaattcgggtcatgcaaagtgaaaccgccatcaaaatggtagaacttttagggggttcgccagtacctatgggtagttcggaagtatatacttctctacaatctaatctaatcaacggtgcagagaataatgagttcgttttatatacagctggtcatggtggtgtggctaagtattattcttatgatgagcatactcgagtgccagatattgtgattatgaacgagggaacaaaagaacgtttgacagcgaaacaagaacaagcgattgaagaagcagcaaaagaatcgaccgcttttgaaaaaacggtctttaaagaagcggttgaagaagaaaagaaaaaagcacaagcagaatatggcgttgtgttcaatcaagtagacagtgaaccattccaaaaacttgttcaaccgttgcatgaatcattcaaaaatagctcagaacatggcgaactgtatcaggctattcgccagttggcggactaa

SEQ ID NO: 178 - protein, 335 aa
MKKRKVLFTAVMVLAGLQLLSGCGKTEASANDTVVLRYAYASNSQPVIDSMKKFGELVEEKTDGKVQIEYFPDGQLGGETELIELTQTGAIDFAKVSGSALESFSKDYSVFAIPYIFDNEKHFFKVMDNQALMQPVYDSTKKLGFVGLTYYDSGQRSFYMSKGPVTSPDDLKGKKIRVMQSETAIKMVELLGGSPVPMGSSEVYTSLQSNLINGAENNEFVLYTAGHGGVAKYYSYDEHTRVPDIVIMNEGTKERLTAKQEQAIEEAAKESTAFEKTVFKEAVEEEKKKAQAEYGVVFNQVDSEPFQKLVQPLHESFKNSSEHGELYQAIRQLAD

SEQ ID NO: 179 - DNA, 943 bp; double-stranded, linear
ttgcggcaaaacagaagcttcggcaaatgatacggtagtcttgcgctatgcgtatgctagtaatagccaaccagttatcgattctatgaagaaattcggtgaattagtagaggaaaaaacagatggtaaagttcaaattgaatattttccagatggtcaattaggaggagaaacagaactaattgaattaacacaaacaggtgcaattgattttgcaaaggtcagtggatcagcattagaaagtttttctaaagattattctgtatttgccattccgtatatttttgataatgaaaaacatttttttaaagtaatggataatcaagcgctaatgcaaccagtgtatgattctacaaaaaaattaggatttgttggtttaacttattatgactctggtcaacgaagtttttatatgagcaaagggcctgttacatctccagatgatttgaaaggtaaaaaaattcgggtcatgcaaagtgaaaccgccatcaaaatggtagaacttttagggggttcgccagtacctatgggtagttcggaagtatatacttctctacaatctaatctaatcaacggtgcagagaataatgagttcgttttatatacagctggtcatggtggtgtggctaagtattattcttatgatgagcatactcgagtgccagatattgtgattatgaacgagggaacaaaagaacgtttgacagcgaaacaagaacaagcgattgaagaagcagcaaaagaatcgaccgcttttgaaaaaacggtctttaaagaagcggttgaagaagaaaagaaaaaagcacaagcagaatatggcgttgtgttcaatcaagtagacagtgaaccattccaaaaacttgttcaaccgttgcatgaatcattcaaaaatagctcagaacatggcgaactgtatcaggctattcgccagttggcggactaa

SEQ ID NO: 180 - protein, 313 aa
CGKTEASANDTVVLRYAYASNSQPVIDSMKKFGELVEEKTDGKVQIEYFPDGQLGGETELIELTQTGAIDFAKVSGSALESFSKDYSVFAIPYIFDNEKHFFKVMDNQALMQPVYDSTKKLGFVGLTYYDSGQRSFYMSKGPVTSPDDLKGKKIRVMQSETAIKMVELLGGSPVPMGSSEVYTSLQSNLINGAENNEFVLYTAGHGGVAKYYSYDEHTRVPDIVIMNEGTKERLTAKQEQAIEEAAKESTAFEKTVFKEAVEEEKKKAQAEYGVVFNQVDSEPFQKLVQPLHESFKNSSEHGELYQAIRQLAD

SEQ ID NO: 181 - DNA, 1110 bp; double-stranded, linear
tgagactctttctttttcaaaatgaggtatggtatagttataacaganataaaactanaaaaaacaggagtgcataagagaatgaagaaaaaactaatcttagctgcagcgggcgcaatggccgtttttagtttagcagcgtgttcaagcggttcaaaagatatcgcaacaatgaaaggttcaacaattactgttgatgatttttataaccaaattaaagaacaaagcactagccaacaagcgtttagccaaatggttatttataaagtctttgaagaaaaatatggcgacaaagtaactgacaaaganattcaaaaaaactttgacgaagccaaagaacaagtagaagcacaaggcggaaagttctctgatgcattaaaacaagctggtttaactgaaaaaacattcaagaaacagttaaaacaaagagcagcctatgatgcaggtctaaaagcccacttaaaaattacagatgaagacttaaaaacagcttgggcaagtttccatccagaagtagaagcacaaattatccaagttgcttcagaagatgatgccaaagctgtcaagaaagaaatcactgacggcggcgatttcacaaaaattgctaaagaaaaatcaacagatactgctacgaaaaaagatggcggtaaaattaaatttgattcacaagcaacaactgttcctgccgaagttaaagaagctgccttcaaattaaaagatggcgaagtgtcagaaccaattgctgcaacaaatatgcaaacctaccaaacaacctactatgtagtgaaaatgacgaaaaacaaagcaaaaggcaatgacatgaaaccttatgaaaaagagatcaagaaaattgctgaagaaacaaaattagccgatcaaacatttgtttcgaaagtcattagtgacgaattaaaagcggccaatgtgaaaattaaagatgatgccttcaagaacgctttagcaggctacatgcaaactgaatcttcaagcgcttcttcagagaaaaaagaatcaaaatcaagtgattctaaaacaagcgataccaaaacaagcgactctgaaaaagcaacagattcttcaagcaaaacaacagaatcttcttctaaataa

SEQ ID NO: 182 - protein, 342 aa
MKKKLILAAAGAMAVFSLAACSSGSKDIATMKGSTITVDDFYNQIKEQSTSQQAFSQMVIYKVFEEKYGDKVTDKXIQKNFDEAKEQVEAQGGKFSDALKQAGLTEKTFKKQLKQRAAYDAGLKAHLKITDEDLKTAWASFHPEVEAQIIQVASEDDAKAVKKEITDGGDFTKIAKEKSTDTATKKDGGKIKFDSQATTVPAEVKEAAFKLKDGEVSEPIAATNMQTYQTTYYVVKMTKNKAKGNDMKPYEKEIKKIAEETKLADQTFVSKVISDELKAANVKIKDDAFKNALAGYMQTESSSASSEKKESKSSDSKTSDTKTSDSEKATDSSSKTTESSSK

SEQ ID NO: 183 - DNA, 970 bp; double-stranded, linear
gtgttcaagcggttcaaaagatatcgcaacaatgaaaggttcaacaattactgttgatgatttttataaccaaattaaagaacaaagcactagccaacaagcgtttagccaaatggttatttataaagtctttgaagaaaaatatggcgacaaagtaactgacaaaganattcaaaaaaactttgacgaagccaaagaacaagtagaagcacaaggcggaaagttctctgatgcattaaaacaagctggtttaactgaaaaaacattcaagaaacagttaaaacaaagagcagcctatgatgcaggtctaaaagcccacttaaaaattacagatgaagacttaaaaacagcttgggcaagtttccatccagaagtagaagcacaaattatccaagttgcttcagaagatgatgccaaagctgtcaagaaagaaatcactgacggcggcgatttcacaaaaattgctaaagaaaaatcaacagatactgctacgaaaaaagatggcggtaaaattaaatttgattcacaagcaacaactgttcctgccgaagttaaagaagctgccttcaaattaaaagatggcgaagtgtcagaaccaattgctgcaacaaatatgcaaacctaccaaacaacctactatgtagtgaaaatgacgaaaaacaaagcaaaaggcaatgacatgaaaccttatgaaaaagagatcaagaaaattgctgaagaaacaaaattagccgatcaaacatttgtttcgaaagtcattagtgacgaattaaaagcggccaatgtgaaaattaaagatgatgccttcaagaacgctttagcaggctacatgcaaactgaatcttcaagcgcttcttcagagaaaaaagaatcaaaatcaagtgattctaaaacaagcgataccaaaacaagcgactctgaaaaagcaacagattcttcaagcaaaacaacagaatcttcttctaaataa

SEQ ID NO: 184 - protein, 322 aa
CSSGSKDIATMKGSTITVDDFYNQIKEQSTSQQAFSQMVIYKVFEEKYGDKVTDKXIQKNFDEAKEQVEAQGGKFSDALKQAGLTEKTFKKQLKQRAAYDAGLKAHLKITDEDLKTAWASFHPEVEAQIIQVASEDDAKAVKKEITDGGDFTKIAKEKSTDTATKKDGGKIKFDSQATTVPAEVKEAAFKLKDGEVSEPIAATNMQTYQTTYYVVKMTKNKAKGNDMKPYEKEIKKIAEETKLADQTFVSKVISDELKAANVKIKDDAFKNALAGYMQTESSSASSEKKESKSSDSKTSDTKTSDSEKATDSSSKTTESSSK

SEQ ID NO: 185 - DNA, 954 bp; double-stranded, linear
tagggtctggaaaagcagtcaactgacttcttttccaagcccttttttagttcatcgcagaaaggatgnaaaaaaatgaacatgcccaaaaatatcngttatttttctttgctaatgggtcttgttctattattaagtgcttgccaaattggggcaactacgaaggatgacaaccaagccgccacaaaagaagcaactgttgagttaaaccgcacaacaacaccaacgcttttttttcatggttacgcaggaactaaaaattcgtttggctcgttactgcatcgcttggagaaacaaggtgccacaactcaagaattagtgctactcgttaaacctgatgggaccgtggttaaagagcgaggagctttaagtggcaaagcgacgaatcccagtgttcaagttctatttgaagataataaaaacaatgaatggaatcaaacagaatggataaaaaacacattactctatttacaaaaaaattatcaagtgaacaaagccaatattgtcgggcactctatgggtggtgttagtggtttacgttatttaggaacctatgggcaagatacatcgttacctaaaattgaaaaattcgtcagcattggagcacctttcaatgattttattgatacgagtcaacagcaaaccatcgaaacggaactagaaaacggccccacagaaaaaagtagccgctatttggattatcaagagatgattaatgttgttccagaaaaactgcccattttattaattggtggtcaattaagtccaacagatttaagtgatggaacggtgccgttatctagtgccttagcagtcaacgccttgctaagacagcgaggaactcaagtcactagccagattattaaaggagaaaatgcacaacatagtcaattacatgaaaatcctgaagtagatcaattgctaatcgaatttctatggccgagtaaaaaatag

SEQ ID NO: 186 - protein, 292 aa
MNMPKNIXYFSLLMGLVLLLSACQIGATTKDDNQAATKEATVELNRTTTPTLFFHGYAGTKNSFGSLLHRLEKQGATTQELVLLVKPDGTVVKERGALSGKATNPSVQVLFEDNKNNEWNQTEWIKNTLLYLQKNYQVNKANIVGHSMGGVSGLRYLGTYGQDTSLPKIEKFVSIGAPFNDFIDTSQQQTIETELENGPTEKSSRYLDYQEMINVVPEKLPILLIGGQLSPTDLSDGTVPLSSALAVNALLRQRGTQVTSQIIKGENAQHSQLHENPEVDQLLIEFLWPSKK

SEQ ID NO: 187 - DNA, 814 bp; double-stranded, linear
ttgccaaattggggcaactacgaaggatgacaaccaagccgccacaaaagaagcaactgttgagttaaaccgcacaacaacaccaacgcttttttttcatggttacgcaggaactaaaaattcgtttggctcgttactgcatcgcttggagaaacaaggtgccacaactcaagaattagtgctactcgttaaacctgatgggaccgtggttaaagagcgaggagctttaagtggcaaagcgacgaatcccagtgttcaagttctatttgaagataataaaaacaatgaatggaatcaaacagaatggataaaaaacacattactctatttacaaaaaaattatcaagtgaacaaagccaatattgtcgggcactctatgggtggtgttagtggtttacgttatttaggaacctatgggcaagatacatcgttacctaaaattgaaaaattcgtcagcattggagcacctttcaatgattttattgatacgagtcaacagcaaaccatcgaaacggaactagaaaacggccccacagaaaaaagtagccgctatttggattatcaagagatgattaatgttgttccagaaaaactgcccattttattaattggtggtcaattaagtccaacagatttaagtgatggaacggtgccgttatctagtgccttagcagtcaacgccttgctaagacagcgaggaactcaagtcactagccagattattaaaggagaaaatgcacaacatagtcaattacatgaaaatcctgaagtagatcaattgctaatcgaatttctatggccgagtaaaaaatag

SEQ ID NO: 188 - protein, 270 aa
CQIGATTKDDNQAATKEATVELNRTTTPTLFFHGYAGTKNSFGSLLHRLEKQGATTQELVLLVKPDGTVVKERGALSGKATNPSVQVLFEDNKNNEWNQTEWIKNTLLYLQKNYQVNKANIVGHSMGGVSGLRYLGTYGQDTSLPKIEKFVSIGAPFNDFIDTSQQQTIETELENGPTEKSSRYLDYQEMINVVPEKLPILLIGGQLSPTDLSDGTVPLSSALAVNALLRQRGTQVTSQIIKGENAQHSQLHENPEVDQLLIEFLWPSKK

SEQ ID NO: 189 - DNA, 822 bp; double-stranded, linear
taaaagaaaagaggcgttcaaatgtctaaacaaaaaaaggctgtgttcctgcttagtttattcagtttagttgccctaattgctgcatgtacaaatcagccgcaaaaagaaacagtttcaacaaaaaaagaagaaataacccttgcggcagcagctagcttagaatcagtcatggagaagaaaattattccagcctttgaaaaagagcatccagatattcaggtaactggaacctatgatagttctggaaaattacagatgcaaattgaaaaaggcctaaaagccgatgtatttttctcagcttcgacaaaacaaatgaatgcattggttgcagaaaaactaattaataaaaaaagtgtcgttcctttattggaaaaccagctcgttcttattgtgcctaaccaagatcaagcaaagtggcatgatttttctgatttaaaaaaagcccaaatgatagcaattggtgatcctgcaagtgttccagctggtcaatatgccgaagaaggcttaaaagctttaggcgcttggtcttatgtagaaaaacacgcaagctttggcacgaatgtaacagaagtccttgaatgggtagctaatgcaagtgcagaagctggcttagtttatgcgacagatgcagcaaccaattcaaaagtagcgattgttgcggccatgcctgaagctgttttgaaaaagccaattatctatccagttggtaaagttgccgcctctaagaaacaaaaatcagcagatgcttttttaaattttttacagagtcaacaatgcagaaaatattttganaatattggctttaagttaacaaagtag

SEQ ID NO: 190 - protein, 266 aa
MSKQKKAVFLLSLFSLVALIAACTNQPQKETVSTKKEEITLAAAASLESVMEKKIIPAFEKEHPDIQVTGTYDSSGKLQMQIEKGLKADVFFSASTKQMNALVAEKLINKKSVVPLLENQLVLIVPNQDQAKWHDFSDLKKAQMIAIGDPASVPAGQYAEEGLKALGAWSYVEKHASFGTNVTEVLEWVANASAEAGLVYATDAATNSKVAIVAAMPEAVLKKPIIYPVGKVAASKKQKSADAFLNFLQSQQCRKYFXNIGFKLTK

SEQ ID NO: 191 - DNA, 736 bp; double-stranded, linear
atgtacaaatcagccgcaaaaagaaacagtttcaacaaaaaaagaagaaataacccttgcggcagcagctagcttagaatcagtcatggagaagaaaattattccagcctttgaaaaagagcatccagatattcaggtaactggaacctatgatagttctggaaaattacagatgcaaattgaaaaaggcctaaaagccgatgtatttttctcagcttcgacaaaacaaatgaatgcattggttgcagaaaaactaattaataaaaaaagtgtcgttcctttattggaaaaccagctcgttcttattgtgcctaaccaagatcaagcaaagtggcatgatttttctgatttaaaaaaagcccaaatgatagcaattggtgatcctgcaagtgttccagctggtcaatatgccgaagaaggcttaaaagctttaggcgcttggtcttatgtagaaaaacacgcaagctttggcacgaatgtaacagaagtccttgaatgggtagctaatgcaagtgcagaagctggcttagtttatgcgacagatgcagcaaccaattcaaaagtagcgattgttgcggccatgcctgaagctgttttgaaaaagccaattatctatccagttggtaaagttgccgcctctaagaaacaaaaatcagcagatgcttttttaaattttttacagagtcaacaatgcagaaaatattttganaatattggctttaagttaacaaagtag

SEQ ID NO: 192 - protein, 244 aa
CTNQPQKETVSTKKEEITLAAAASLESVMEKKIIPAFEKEHPDIQVTGTYDSSGKLQMQIEKGLKADVFFSASTKQMNALVAEKLINKKSVVPLLENQLVLIVPNQDQAKWHDFSDLKKAQMIAIGDPASVPAGQYAEEGLKALGAWSYVEKHASFGTNVTEVLEWVANASAEAGLVYATDAATNSKVAIVAAMPEAVLKKPIIYPVGKVAASKKQKSADAFLNFLQSQQCRKYFXNIGFKLTK

SEQ ID NO: 193 - DNA, 501 bp; double-stranded, linear
taaagtaggagaagcgcaagcgaaaaaagtgaatcaatcggcagcgtatcaagtagtgatcccacaatgggtaccatgggtagcattatctttgacagtagcacttgctggattgattgcttacttagttcgtcgtggagagaagtggaaaaacgaaggggaagtgacataatgagangangaaatcttcngtttttattattgttggttctattaatttatattcctcaaacaacttatgcagaaaatagggagaccacagaagtcggaatcgggtttacaaaaacttcagacataccatcaaaaaaaaatccagttgtgaatgtattgccgcaaacaaccattcaatcgctatcaatcgttcgtagcagaacgcaaataaaaagattacctaaaactggtgacaatcgaataacttggctaagctggtttggcatattgtttttaataagtagtttttggctgtttctatttagacaattatgtagaaaaggagaataa

SEQ ID NO: 194 - protein, 109 aa
MRXXNLXFLLLLVLLIYIPQTTYAENRETTEVGIGFTKTSDIPSKKNPVVNVLPQTTIQSLSIVRSRTQIKRLPKTGDNRITWLSWFGILFLISSFWLFLFRQLCRKGE

SEQ ID NO: 195 - DNA, 146 bp; double-stranded, linear
agaaaatagggagaccacagaagtcggaatcgggtttacaaaaacttcagacataccatcaaaaaaaaatccagttgtgaatgtattgccgcaaacaaccattcaatcgctatcaatcgttcgtagcagaacgcaaataaaaagat

SEQ ID NO: 196 - protein, 48 aa
ENRETTEVGIGFTKTSDIPSKKNPVVNVLPQTTIQSLSIVRSRTQIKR

SEQ ID NO: 197 - DNA, 426 bp; double-stranded, linear
tagtcatggcaccataacaaggaggagagaagtgagatgaaaaaataccttttgcttagttgttttttaggtcttttcagcttctgtcattcagacactgcgtttggagaagcagcttatgaaaatagtggtgttgtctccttttatggaacgtatgaatatcccacagaagagtcgacaacagcgactagtaattcttccacaacgaccgaacccaccaagccagctgacggaggcgcttcatccgtcctttcttctggcgtatatggatcgcgacaaggaagattaccagcgacaggtaccaccaatcaagcaccatttatttatttgggaatcagccttatcactataggcatattatttattaaaaggagaagagaagatgaaaaaaacagtattagcagtagtagggattgtaggatttag

SEQ ID NO: 198 - protein, 129 aa
MKKYLLLSCFLGLFSFCHSDTAFGEAAYENSGVVSFYGTYEYPTEESTTATSNSSTTTEPTKPADGGASSVLSSGVYGSRQGRLPATGTTNQAPFIYLGISLITIGILFIKRRREDEKNSISSSRDCRI

SEQ ID NO: 199 - DNA, 183 bp; double-stranded, linear
tttggagaagcagcttatgaaaatagtggtgttgtctccttttatggaacgtatgaatatcccacagaagagtcgacaacagcgactagtaattcttccacaacgaccgaacccaccaagccagctgacggaggcgcttcatccgtcctttcttctggcgtatatggatcgcgacaaggaaga

SEQ ID NO: 200 - protein, 61 aa
FGEAAYENSGVVSFYGTYEYPTEESTTATSNSSTTTEPTKPADGGASSVLSSGVYGSRQGR

SEQ ID NO: 201 - DNA, 888 bp; double-stranded, linear
taaataaaaaattatttggaggaaattacaatgaaaaaaattattttatcaagcttgtttagtgcagtactagtattcggtggcggaagtataacagcattcgctgacgatttaggaccaacagatccagcaactccaccaattaccgaaccaactgattctagtgaacctacgaatcctactgagccggtggatcctgcagaaccgccagtaataccaactgatccaacagaaccaagcaagccaaccgagcctacaacaccgagtgagccagaaaagccaacagaaccaacaacgccaattgatcctggaacgccggttgaaccgactgaaccaagcgagccaacagaacctagtcaaccaaccgagcctacaacaccaagcgaaccagaaaaacctgttactccagaacaaccgaaagaaccaactcaaccagtgattccagaaaaaccagcagaaccagaaacaccaaaaactcctgaacagcccactaaaccaatagacgtagtcgttacacctagtggagaaattgataaaacgaatcaatcggcaggaacacaaccaagtattcctattgaaacaagcaacttagcggaggtaacacatgtaccaagtgaaactactccaattacaacagaagctggggaagaaattgtagcagtagataaaggtgttccgttaaccaaaacaccagaaggattaaaaccaattagcagctcgtataaggttttacctagcggaaacgttgaggtaaaagcaagtgatggaaaaatgaaagtattgccacatacaggagagaaattcacactccttttctctgtattgggaagcttctttgtattaatttcaggattctttttctttaaaaagaataagaaaaaagcttaa

SEQ ID NO: 202 - protein, 285 aa
MKKIILSSLFSAVLVFGGGSITAFADDLGPTDPATPPITEPTDSSEPTNPTEPVDPAEPPVIPTDPTEPSKPTEPTTPSEPEKPTEPTTPIDPGTPVEPTEPSEPTEPSQPTEPTTPSEPEKPVTPEQPKEPTQPVIPEKPAEPETPKTPEQPTKPIDVVVTPSGEIDKTNQSAGTQPSIPIETSNLAEVTHVPSETTPITTEAGEEIVAVDKGVPLTKTPEGLKPISSSYKVLPSGNVEVKASDGKMKVLPHTGEKFTLLFSVLGSFFVLISGFFFFKKNKKKA

SEQ ID NO: 203 - DNA, 662 bp; double-stranded, linear
aacagatccagcaactccaccaattaccgaaccaactgattctagtgaacctacgaatcctactgagccggtggatcctgcagaaccgccagtaataccaactgatccaacagaaccaagcaagccaaccgagcctacaacaccgagtgagccagaaaagccaacagaaccaacaacgccaattgatcctggaacgccggttgaaccgactgaaccaagcgagccaacagaacctagtcaaccaaccgagcctacaacaccaagcgaaccagaaaaacctgttactccagaacaaccgaaagaaccaactcaaccagtgattccagaaaaaccagcagaaccagaaacaccaaaaactcctgaacagcccactaaaccaatagacgtagtcgttacacctagtggagaaattgataaaacgaatcaatcggcaggaacacaaccaagtattcctattgaaacaagcaacttagcggaggtaacacatgtaccaagtgaaactactccaattacaacagaagctggggaagaaattgtagcagtagataaaggtgttccgttaaccaaaacaccagaaggattaaaaccaattagcagctcgtataaggttttacctagcggaaacgttgaggtaaaagcaagtgatggaaaaatgaaagtat

SEQ ID NO: 204 - protein, 225 aa
DDLGPTDPATPPITEPTDSSEPTNPTEPVDPAEPPVIPTDPTEPSKPTEPTTPSEPEKPTEPTTPIDPGTPVEPTEPSEPTEPSQPTEPTTPSEPEKPVTPEQPKEPTQPVIPEKPAEPETPKTPEQPTKPIDVVVTPSGEIDKTNQSAGTQPSIPIETSNLAEVTHVPSETTPITTEAGEEIVAVDKGVPLTKTPEGLKPISSSYKVLPSGNVEVKASDGKMKV

SEQ ID NO: 205 - DNA, 435 bp; double-stranded, linear
taacaaaaggttgttttgtctttcttgtgtaaaagggcaagaaaggctagcgagttaaaaggaggtttttcaatgaaaaaaaagcgttatttaatgattgtgtgtctactatcttctcctagtttttttataaatgttgaagcgtctgatggtggttctagttcggtggggattgaattttaccaaaatccgagaacacccgctcctaaagatcccccaccgaaaacagatgcgccagctgctgatcccaaggaaccagctggtcctccgcaaggagatcaacgaagtggtggttcgacacagaccaccacaactggctcaacgctccctcgtacagggagcaagagtcaggcaaatttgagcattctcngnttcgccttaatcggtttggcgggaatcgtacatagaaagaagggacgacatgaagcaaactaa

SEQ ID NO: 206 - protein, 120 aa
MKKKRYLMIVCLLSSPSFFINVEASDGGSSSVGIEFYQNPRTPAPKDPPPKTDAPAADPKEPAGPPQGDQRSGGSTQTTTTGSTLPRTGSKSQANLSILXFALIGLAGIVHRKKGRHEAN

SEQ ID NO: 207 - DNA, 184 bp; double-stranded, linear
agcgtctgatggtggttctagttcggtggggattgaattttaccaaaatccgagaacacccgctcctaaagatcccccaccgaaaacagatgcgccagctgctgatcccaaggaaccagctggtcctccgcaaggagatcaacgaagtggtggttcgacacagaccaccacaactggctcaacg

SEQ ID NO: 208 - protein, 60 aa
SDGGSSSVGIEFYQNPRTPAPKDPPPKTDAPAADPKEPAGPPQGDQRSGGSTQTTTTGST

SEQ ID NO: 209 - DNA, 366 bp; double-stranded, linear
taaatgaaaaaaaagcgttatttaataattgcgtgtttactattttcccctagtttttttataaatgttgaagcatctgagggtggttctagttcggtgggaattgaattttaccaaaatccggcaacacccgctcctaaagatgccccaccgaaaacagatgagccagctgcggatcccaaggaaccagctggtcctctgcaaggagatcaacgaagtggtggttcgacacagaccaccacagctggctcgcagctccctcgtacaggaagcaagagtcaggcaaacctgagcattcttggtcttgtcttgattggtcttgtcggaatggtccagagaaagaagggacgacatgaagcaaactaa

SEQ ID NO: 210 - protein, 120 aa
MKKKRYLIIACLLFSPSFFINVEASEGGSSSVGIEFYQNPATPAPKDAPPKTDEPAADPKEPAGPLQGDQRSGGSTQTTTAGSQLPRTGSKSQANLSILGLVLIGLVGMVQRKKGRHEAN

SEQ ID NO: 211 - DNA, 181 bp; double-stranded, linear
atctgagggtggttctagttcggtgggaattgaattttaccaaaatccggcaacacccgctcctaaagatgccccaccgaaaacagatgagccagctgcggatcccaaggaaccagctggtcctctgcaaggagatcaacgaagtggtggttcgacacagaccaccacagctggctcgcag

SEQ ID NO: 212 - protein, 60 aa
SEGGSSSVGIEFYQNPATPAPKDAPPKTDEPAADPKEPAGPLQGDQRSGGSTQTTTAGSQ

SEQ ID NO: 213 - DNA, 393 bp; double-stranded, linear
taatgtttattggctgggccagtcaatgttgaaaatggggaaggaggaattcagatgaaaatcataaaaaggtttagtttggtatgtttagggctattgatcattgggttgcnaacaaaaagcgntatggctgaagaaaataattatgaatcaaatggtcaagcgagcttctatggtacctacgtttatgagaatgaaaaagagtcaaatgacgtagcgtatacccaacaatcagaagaacagggaagaaacaatttagctgcttctggacaagcagttttacctaaaacaggcgagtctgaaaatccgctgtattccttgataggagttagtttgttggggatagtcatttatttaattaataaaatgaaacgagagaaggagtttatttaa

SEQ ID NO: 214 - protein, 112 aa
MKIIKRFSLVCLGLLIIGLXTKSXMAEENNYESNGQASFYGTYVYENEKESNDVAYTQQSEEQGRNNLAASGQAVLPKTGESENPLYSLIGVSLLGIVIYLINKMKREKEFI

SEQ ID NO: 215 - DNA, 143 bp; double-stranded, linear
aaataattatgaatcaaatggtcaagcgagcttctatggtacctacgtttatgagaatgaaaaagagtcaaatgacgtagcgtatacccaacaatcagaagaacagggaagaaacaatttagctgcttctggacaagcagttt

SEQ ID NO: 216 - protein, 49 aa
EENNYESNGQASFYGTYVYENEKESNDVAYTQQSEEQGRNNLAASGQAV

SEQ ID NO: 217 - DNA, 1983 bp; double-stranded, linear
tgaagaacgttctatttggttgacgattgcaggcctgctaatcattgggatggtagtcatttggctattttatcaaaaacaaaaaagaggagagagaaaatgaagcaattaaaaaaagtttggtacaccgttagtaccttgttactaattttgccacttttcacaagtgtattagggacaacaactgcatttgcagaagaaaatggggagagcgcacagctcgtgattcacaaaaagaaaatgacggatttaccagatccgcttattcaaaatagcgggaaagaaatgagcgagtttgataaatatcaaggactggcagatgtgacgtttagtatttataacgtgacgaacgaattttacgagcaacgagcggcaggcgcaagcgttgatgcagctaaacaagctgtccaaagtttaactcctgggaaacctgttgctcaaggaaccaccgatgcaaatgggaatgtcactgttcagttacctaaaaaacaaaatggtaaagatgcagtgtataccattaaagaagaaccaaaagagggtgtagttgctgctacgaatatggtggtggcgttcccagtttacgaaatgatcaagcaaacagatggttcctataaatatggaacagaagaattagcggttgttcatatttatcctaaaaatgtggtagccaatgatggtagtttacatgtgaaaaaagtaggaactgctgaaaatgaaggattaaatggcgcagaatttgttatttctaaaagcgaaggctcaccaggcacagtaaaatatatccaaggagtcaaagatggattatatacatggacaacggataaagaacaagcaaaacgctttattactgggaaaagttatgaaattggcgaaaatgatttcacagaagcagagaatggaacgggagaattaacagttaaaaatcttgaggttggttcgtatattttagaagaagtaaaagctccaaataatgcagaattaattgaaaatcaaacaaaaacaccatttacaattgaagcaaacaatcaaacacctgttgaaaaaacagtcaaaaatgatacctctaaagttgataaaacaacaccaagcttagatggtaaagatgtggcaattggcgaaaaaattaaatatcaaatttctgtaaatattccattggggattgcagacaaagaaggcgacgctaataaatacgtcaaattcaatttagttgataaacatgatgcagccttaacttttgataacgtgacttctggagagtatgcttatgcgttatatgatggggatacagtgattgctcctgaaaattatcaagtgactgaacaagcaaatggcttcactgtcgccgttaatccagcgtatattcctacgctaacaccaggcggcacactaaaattcgtttactttatgcatttaaatgaaaaagcagatcctacgaaaggctttaaaaatgaggcgaatgttgataacggtcataccgacgaccaaacaccaccaactgttgaagttgtgacaggtgggaaacgtttcattaaagtcgatggcgatgtgacagcgacacaagccttggcgggagcttcctttgtcgtccgtgatcaaaacagcgacacagcaaattatttgaaaatcgatgaaacaacgaaagcagcaacttgggtgaaaacaaaagctgaagcaactacttttacaacaacggctgatggattagttgatatcacagggcttaaatacggtacctattatttagaagaaactgtagctcctgatgattatgtcttgttaacaaatcggattgaatttgtggtcaatgaacaatcatatggcacaacagaaaacctagtttcaccagaaaaagtaccaaacaaacacaaaggtaccttaccttcaacaggtggcaaaggaatctacgtttacttaggaagtggcgcagtcttgctacttattgcaggagtctactttgctagacgtagaaaagaaaatgcttaa

SEQ ID NO: 218 - protein, 627 aa
MKQLKKVWYTVSTLLLILPLFTSVLGTTTAFAEENGESAQLVIHKKKMTDLPDPLIQNSGKEMSEFDKYQGLADVTFSIYNVTNEFYEQRAAGASVDAAKQAVQSLTPGKPVAQGTTDANGNVTVQLPKKQNGKDAVYTIKEEPKEGVVAATNMVVAFPVYEMIKQTDGSYKYGTEELAVVHIYPKNVVANDGSLHVKKVGTAENEGLNGAEFVISKSEGSPGTVKYIQGVKDGLYTWTTDKEQAKRFITGKSYEIGENDFTEAENGTGELTVKNLEVGSYILEEVKAPNNAELIENQTKTPFTIEANNQTPVEKTVKNDTSKVDKTTPSLDGKDVAIGEKIKYQISVNIPLGIADKEGDANKYVKFNLVDKHDAALTFDNVTSGEYAYALYDGDTVIAPENYQVTEQANGFTVAVNPAYIPTLTPGGTLKFVYFMHLNEKADPTKGFKNEANVDNGHTDDQTPPTVEVVTGGKRFIKVDGDVTATQALAGASFVVRDQNSDTANYLKIDETTKAATWVKTKAEATTFTTTADGLVDITGLKYGTYYLEETVAPDDYVLLTNRIEFVVNEQSYGTTENLVSPEKVPNKHKGTLPSTGGKGIYVYLGSGAVLLLIAGVYFARRRKENA

SEQ ID NO: 219 - DNA, 1687 bp; double-stranded, linear
agaagaaaatggggagagcgcacagctcgtgattcacaaaaagaaaatgacggatttaccagatccgcttattcaaaatagcgggaaagaaatgagcgagtttgataaatatcaaggactggcagatgtgacgtttagtatttataacgtgacgaacgaattttacgagcaacgagcggcaggcgcaagcgttgatgcagctaaacaagctgtccaaagtttaactcctgggaaacctgttgctcaaggaaccaccgatgcaaatgggaatgtcactgttcagttacctaaaaaacaaaatggtaaagatgcagtgtataccattaaagaagaaccaaaagagggtgtagttgctgctacgaatatggtggtggcgttcccagtttacgaaatgatcaagcaaacagatggttcctataaatatggaacagaagaattagcggttgttcatatttatcctaaaaatgtggtagccaatgatggtagtttacatgtgaaaaaagtaggaactgctgaaaatgaaggattaaatggcgcagaatttgttatttctaaaagcgaaggctcaccaggcacagtaaaatatatccaaggagtcaaagatggattatatacatggacaacggataaagaacaagcaaaacgctttattactgggaaaagttatgaaattggcgaaaatgatttcacagaagcagagaatggaacgggagaattaacagttaaaaatcttgaggttggttcgtatattttagaagaagtaaaagctccaaataatgcagaattaattgaaaatcaaacaaaaacaccatttacaattgaagcaaacaatcaaacacctgttgaaaaaacagtcaaaaatgatacctctaaagttgataaaacaacaccaagcttagatggtaaagatgtggcaattggcgaaaaaattaaatatcaaatttctgtaaatattccattggggattgcagacaaagaaggcgacgctaataaatacgtcaaattcaatttagttgataaacatgatgcagccttaacttttgataacgtgacttctggagagtatgcttatgcgttatatgatggggatacagtgattgctcctgaaaattatcaagtgactgaacaagcaaatggcttcactgtcgccgttaatccagcgtatattcctacgctaacaccaggcggcacactaaaattcgtttactttatgcatttaaatgaaaaagcagatcctacgaaaggctttaaaaatgaggcgaatgttgataacggtcataccgacgaccaaacaccaccaactgttgaagttgtgacaggtgggaaacgtttcattaaagtcgatggcgatgtgacagcgacacaagccttggcgggagcttcctttgtcgtccgtgatcaaaacagcgacacagcaaattatttgaaaatcgatgaaacaacgaaagcagcaacttgggtgaaaacaaaagctgaagcaactacttttacaacaacggctgatggattagttgatatcacagggcttaaatacggtacctattatttagaagaaactgtagctcctgatgattatgtcttgttaacaaatcggattgaatttgtggtcaatgaacaatcatatggcacaacagaaaacctagtttcaccagaaaaagtaccaaacaaacacaaaggtaccttacct

SEQ ID NO: 220 - protein, 560 aa
EENGESAQLVIHKKKMTDLPDPLIQNSGKEMSEFDKYQGLADVTFSIYNVTNEFYEQRAAGASVDAAKQAVQSLTPGKPVAQGTTDANGNVTVQLPKKQNGKDAVYTIKEEPKEGVVAATNMVVAFPVYEMIKQTDGSYKYGTEELAVVHIYPKNVVANDGSLHVKKVGTAENEGLNGAEFVISKSEGSPGTVKYIQGVKDGLYTWTTDKEQAKRFITGKSYEIGENDFTEAENGTGELTVKNLEVGSYILEEVKAPNNAELIENQTKTPFTIEANNQTPVEKTVKNDTSKVDKTTPSLDGKDVAIGEKIKYQISVNIPLGIADKEGDANKYVKFNLVDKHDAALTFDNVTSGEYAYALYDGDTVIAPENYQVTEQANGFTVAVNPAYIPTLTPGGTLKFVYFMHLNEKADPTKGFKNEANVDNGHTDDQTPPTVEVVTGGKRFIKVDGDVTATQALAGASFVVRDQNSDTANYLKIDETTKAATWVKTKAEATTFTTTADGLVDITGLKYGTYYLEETVAPDDYVLLTNRIEFVVNEQSYGTTENLVSPEKVPNKHKGT

SEQ ID NO: 221 - DNA, 867 bp; double-stranded, linear
tagattggaagaatgaaaatgaaaaaaatgattattattgccttattcagtacaagccttttagcagggggaagcagtgtttctgcttatgcgcaagaatcagaaggaaatcttggtgaaacaacagggagtgttttaccagatgaaccgaatgtaccaactgacccaataacgccaagtgagccagagcaaccaacagagccaagtacaccagagcaaccatcggaaccgtcaacaccaaccgaacctagtgagccttcaaaaccgacggatccttcgttaccagacgaaccgagcgtaccaacagagccaacaacgccaagtaagccagagcaaccaacagagccaacaacgccaagtgtaccagagcaaccaacagagccaagtgtaccagaaaaaccagtagaaccaaataaaccaaccgagccagaaaagcctgtgccagttgttcctgaaaaaccagttgtaccacaacaaccagagcaaccaacagatgtggtggtaaagccaaatggagaaattgcaacaggagaatctacacaacagccaactgttccaattgaaacgaataacctttcagaagtaacacatgtcccaactgtgacgacaccgattgaaacagcaagcggagaagcaattgtcgcagtggataagggcgttcctttaacacaaacggctgatggattaaaaccgattaaaagtgaatataaagtattaccaagtggcaatgtacaagtgaaaagtgctgacggaaaaatgaaagtacttccttacactggtgaaaaaatgggcataattgggtcaatcgctggtgtatgtttgactgttttatcaggaatcttaatttataaaaaacgtaaagtgtag

SEQ ID NO: 222 - protein, 282 aa
MKKMIIIALFSTSLLAGGSSVSAYAQESEGNLGETTGSVLPDEPNVPTDPITPSEPEQPTEPSTPEQPSEPSTPTEPSEPSKPTDPSLPDEPSVPTEPTTPSKPEQPTEPTTPSVPEQPTEPSVPEKPVEPNKPTEPEKPVPVVPEKPVVPQQPEQPTDVVVKPNGEIATGESTQQPTVPIETNNLSEVTHVPTVTTPIETASGEAIVAVDKGVPLTQTADGLKPIKSEYKVLPSGNVQVKSADGKMKVLPYTGEKMGIIGSIAGVCLTVLSGILIYKKRKV

SEQ ID NO: 223 - DNA, 665 bp; double-stranded, linear
agaaggaaatcttggtgaaacaacagggagtgttttaccagatgaaccgaatgtaccaactgacccaataacgccaagtgagccagagcaaccaacagagccaagtacaccagagcaaccatcggaaccgtcaacaccaaccgaacctagtgagccttcaaaaccgacggatccttcgttaccagacgaaccgagcgtaccaacagagccaacaacgccaagtaagccagagcaaccaacagagccaacaacgccaagtgtaccagagcaaccaacagagccaagtgtaccagaaaaaccagtagaaccaaataaaccaaccgagccagaaaagcctgtgccagttgttcctgaaaaaccagttgtaccacaacaaccagagcaaccaacagatgtggtggtaaagccaaatggagaaattgcaacaggagaatctacacaacagccaactgttccaattgaaacgaataacctttcagaagtaacacatgtcccaactgtgacgacaccgattgaaacagcaagcggagaagcaattgtcgcagtggataagggcgttcctttaacacaaacggctgatggattaaaaccgattaaaagtgaatataaagtattaccaagtggcaatgtacaagtgaaaagtgctgacggaaaaatgaaagtac

SEQ ID NO: 224 - protein, 221 aa
EGNLGETTGSVLPDEPNVPTDPITPSEPEQPTEPSTPEQPSEPSTPTEPSEPSKPTDPSLPDEPSVPTEPTTPSKPEQPTEPTTPSVPEQPTEPSVPEKPVEPNKPTEPEKPVPVVPEKPVVPQQPEQPTDVVVKPNGEIATGESTQQPTVPIETNNLSEVTHVPTVTTPIETASGEAIVAVDKGVPLTQTADGLKPIKSEYKVLPSGNVQVKSADGKMKV

SEQ ID NO: 225 - DNA, 426 bp; double-stranded, linear
tgaaaaatagacaaggagcacgcgatgatgacaatgaaaagtaaagggtcacttctggtgacgttgggaatacttttaaccgttggcattgcgagtctaattgtttcttctgagagttttgcagaagaagtagggcaaacgaatatcggtgtaacgttctatggaggaaaagagccactaaaaacggaaggtgtcattaagccaatagagcaaccagtcactgataaagataaaaaaacgtcacaacaacaagacaaagtgagcagaaaaaccactgctaaaacgaatccgactaatgcacagacgtcattaccaaggacaggtgaacgaaatagcacgtggctttacagccttggtattgcctgtttactcgtagtactaacaagtttctattatttgaataaaaaaaggaaaaaggaaaaataa

SEQ ID NO: 226 - protein, 133 aa
MMTMKSKGSLLVTLGILLTVGIASLIVSSESFAEEVGQTNIGVTFYGGKEPLKTEGVIKPIEQPVTDKDKKTSQQQDKVSRKTTAKTNPTNAQTSLPRTGERNSTWLYSLGIACLLVVLTSFYYLNKKRKKEK

SEQ ID NO: 227 - DNA, 188 bp; double-stranded, linear
agaagaagtagggcaaacgaatatcggtgtaacgttctatggaggaaaagagccactaaaaacggaaggtgtcattaagccaatagagcaaccagtcactgataaagataaaaaaacgtcacaacaacaagacaaagtgagcagaaaaaccactgctaaaacgaatccgactaatgcacagacgtcat

SEQ ID NO: 228 - protein, 62 aa
EEVGQTNIGVTFYGGKEPLKTEGVIKPIEQPVTDKDKKTSQQQDKVSRKTTAKTNPTNAQTS

SEQ ID NO: 229 - DNA, 834 bp; double-stranded, linear
taatggaacgaccgacagaagaagattttgaacttacaaattaaaattaaaatggaggaaataatgatgaaaaaaattctttttgctagtttatttagtgccacactactatttgggggaagtgaaatttctgcttttgcacaagaaattatccctgatgatactacgacaccgcccattgaagtaccaacagaaccaagtacaccagaaaagccaacagatccaacaccgccaattgagccacctgtagaccctgtagagccacctattacaccaacggagccaacagaaccgacagagccgacaacaccaacagaacctacaactcctacagagccaagtgaaccagaacaaccaacggagccaagtaaaccagtagaacctgaaaaaccagttacaccaagcaaaccagcagaacccgaaaaaactgtgacaccaactaaaccaacagaatctgaaaaaccagtacaaccagcagaaccaagcaagccaatcgacgttgttgtaacgccaacaggggaattaaatcacgctggaaatggtacacaacagccaacagtccctattgaaacaagtaatttggcagaaatcacgcacgtgcctagtgtaacaacacctattacaactacagacggagaaaacattgtagctgtagaaaaaggtgttccacttacacaaacagcagaagggttaaaacctattcaatcnagttacaaagtattgcctagcggaaatgtagaagtaaaaggtaaggacggtaaaatgaaggttttaccatacacaggtgaagaaatgaatatctttttatctgccgtagcggtatcttgtctgtag

SEQ ID NO: 230 - protein, 256 aa
MMKKILFASLFSATLLFGGSEISAFAQEIIPDDTTTPPIEVPTEPSTPEKPTDPTPPIEPPVDPVEPPITPTEPTEPTEPTTPTEPTTPTEPSEPEQPTEPSKPVEPEKPVTPSKPAEPEKTVTPTKPTESEKPVQPAEPSKPIDVVVTPTGELNHAGNGTQQPTVPIETSNLAEITHVPSVTTPITTTDGENIVAVEKGVPLTQTAEGLKPIQSSYKVLPSGNVEVKGKDGKMKVLPYTGEEMNIFLSAVAVSCL

SEQ ID NO: 231 - DNA, 649 bp; double-stranded, linear
gaaatttctgcttttgcacaagaaattatccctgatgatactacgacaccgcccattgaagtaccaacagaaccaagtacaccagaaaagccaacagatccaacaccgccaattgagccacctgtagaccctgtagagccacctattacaccaacggagccaacagaaccgacagagccgacaacaccaacagaacctacaactcctacagagccaagtgaaccagaacaaccaacggagccaagtaaaccagtagaacctgaaaaaccagttacaccaagcaaaccagcagaacccgaaaaaactgtgacaccaactaaaccaacagaatctgaaaaaccagtacaaccagcagaaccaagcaagccaatcgacgttgttgtaacgccaacaggggaattaaatcacgctggaaatggtacacaacagccaacagtccctattgaaacaagtaatttggcagaaatcacgcacgtgcctagtgtaacaacacctattacaactacagacggagaaaacattgtagctgtagaaaaaggtgttccacttacacaaacagcagaagggttaaaacctattcaatcnagttacaaagtattgcctagcggaaatgtagaagtaaaaggtaaggacggtaaaatgaaggttt

SEQ ID NO: 232 - protein, 210 aa
QEIIPDDTTTPPIEVPTEPSTPEKPTDPTPPIEPPVDPVEPPITPTEPTEPTEPTTPTEPTTPTEPSEPEQPTEPSKPVEPEKPVTPSKPAEPEKTVTPTKPTESEKPVQPAEPSKPIDVVVTPTGELNHAGNGTQQPTVPIETSNLAEITHVPSVTTPITTTDGENIVAVEKGVPLTQTAEGLKPIQSSYKVLPSGNVEVKGKDGKMKV

SEQ ID NO: 233 - DNA, 3924 bp; double-stranded, linear
tgattcttgaagcaacaaatgaaagcaaaaaaacaatataagacatataaagctaagaatcactgggtaactgtccctattctttttctaagtgtgttaggagccgtaggattagctactgataatgtacaagccgcggaattagatacgcaaccagaaacaacgacggttcaacccaataaccccgacctgcagtcagaaaaggaaacacctaaaacggcagtatctgaagaagcaacagtacaaaaagacactacttctcaaccgaccaaagtagaagaagtagcgccagaaaataaaggtactgaacaaagttcagctaccccaaatgataccacaaacgcgcaacaaccaacagtaggagctgaaaaatcagcacaagaacaaccagtagtaagccctgaaacaaccaatgaacctctagggcagccaacagaagttgcaccagctgaaaatgaagtgaataaatcaacgtccattcctaaagaatttgaaacaccagacgttgataaagcagttgatgaagtaaaaaaagatccaaacattaccgttgttgaaaaaccagcagaagacttaggcaacgtttcttctaaagatttagctgcaaaagaaaaagaagtagaccaactacaaaaagaacaagcgaaaaagattgcccaacaagcagctgaattaaaagccaaaaatgaaaaaattgccaaagaaaatgcagaaattgcggcaaaaaacaaagcngaaaaagagcgntanganaaagaagtcgcngaatacaacaagcataagaacgaaaacagctatgtcaatgaagcgattagtaaaaacctagtgttcgatcaatctgtcgtgacgaaagacactaaaatttcgtcgattaaaggcggaaaatttatcaaagcaactgattttaataaagtaaatgcaggggattcaaaagatatctttacaaaattacggaaagatatgggngggaaagntactggcaacttccagaattcctttgtaaaagaggcaaatcttgggtctaatggtgggtatgcggttcttttagaaaaaaataaaccagtgacagtgacctatacaggactaaacgctagttatttaggacgtaaaattacaaaagcagaatttgtttatgaactacaatcctcaccaagccaaagtggaacgttaaatgcagtattttcaaacgatccgattatcacngcttttattggtacaaacagagtcaatggtaaggatgttaaaacacgcttaacgattaagttctttgatgcgtcaggtaaagaagtactaccagataaagatagtccatttgcgtatgcgctgtcttctttaaattcaagtttaacgaataaaggtggccatgcggaatttgtttctgattttggggcnaacaatgcgttcaaatacattaatggntcntatgtgaaaaaacaagcggatggaaaattttactcaccggaagatattgactatggcacaggaccttctggattgaaaaatagtgattgggacgctgtaggtcacaagaatgcctactttggttcaggtgtaggtctagcnaatggncgtatttccttttcttttggtatgacaacaaaaggaaaaagtaatgtgcctgtatctagtgcgcaatggtttgcctttagnactaacttaaatgcgcaatcagtgaagcctattttcaattatgggaatccaaaagaaccagaaaaagcaacgattgaattcaatngatacaaagccaatgtcgttcctgtncttgtgccnaataaagaagtcactgatggncagaaaaatntcaatgatttaaatgtgaancgtggcgattctttacaatacattgtgacaggggatacgacagaacttgccaaagtagatccaaaaacagtaacnaaacaagggattcgagatacntttgatgcagaaaaagtgacgattgatttatccaaagtgaaagtttatcaagcagacgcaagtctnaacganaaagactnaaaagctgttgctgcagcnattaattcaggaanagctaaagacgtgactgcttcttatganctcaatttagatcaaaacaccgtcacagcaatgatgaaaaccaacgcngacggntcngttgttttagcaatggggtataaatatttacttgtcttgccgtttgtagtgaaaaatgtagaaggcgattttgaaaatacagctgttcagctgacaaangatggngaaacggtaacaaatacagtgattaaccatgtgccaggtagtaatccttccaaagatgtaaaagcagataaaaacggtacagttggcagtgtttctctacatgataaagatattccgttacaaacaaaaatttattatgaagtgaaatcttccgaacgtccagcnaactatggcggaatnacngaagaatggggcatgaatgatgtcttggacacgacccatgatcgtttcacaggnaaatggcacgctattacnaantatgaccttaaagtagggganaaaacgttaaaagcaggaacagatatttctgcctacattcttttagaaaacaaagacaataaagacttgacgtttacnatgaatcaagcattattggcngcnttaaatgaaggaagcaataaagtaggcaaacaagcttggtctgtgtatctggaagtcgaacggatnaaaacaggtgacgtagaaaacacgcaaacagaaaactacaacaaagagcttgtncgttctaatacngtggtgacgcatacncctgatgatccaaaaccaaccaaagccgttcataacaagaaaggggaaganattaancatggaaaagtngctcgtggtgatgttctttcttatgaaatgacntgggacttaaaagggtacgataaagactttgcctttgatacagtcgatcttgcgacaggcgtttctttcttcgatgattacgatgaaacgaangtgacaccaatcaaagacttacttcgtgtcaaagattctaaaggggnagacattacgaaccagttcacgatctcntgggacgatgccaaaggcacggtgacnatntctgccaaagacccacaagcctttattctagcgnatggtgggcaagaattgcgtgtaacnctccctacaaaagtcaaagccgatgtttctggngatgtttataattcagcggaacaaaatacatttggncaacgaattaaaaccaatacngttgtcaaccatattccaaaagtgaancctaaaaaagacgtggttattaaagtnggtgacaaacaaagtcaaaatggngccacaatcaaattaggggagaanttcttctatgaatttacaagtagtgacattcctgcagaatacgctggngttgtggaagaatggtcgattagcgataaactagacgtcaaacatgacaaatttagtggccaatggtctgtgtttgccaattctaattttgttttagcagacggaaccaaagtgaataaaggggacgacatttcgaaactattcacgatgacctttgaacaaggggtagtgaaaatcacggccagtcaagcctttttngatgcgatgaatctaaaagaaaacaaaaacgttgcacactcatggaaagcgttcattggtgtagaacgaattgcggcaggagacgtttacaacacaatcgaagaatctttcaacaatgagaagattaaaacnaatacggtagtgacncatacgccagaaaaaccacaaacnccaccagaaaaaacagtgattgtaccaccaacaccaaaaacaccgcaagcaccagtagagccattagtggtagaaaaggcaagtgtngtgccagaattgccgcaaacaggcgaaaaacaaaatgtcttattaacggtagctggtagtttagccgcaatgcttggcttagcaggcttaggctttaaacgtagaaaagaaacaaaataa

SEQ ID NO: 234 - protein, 1301 aa
MKAKKQYKTYKAKNHWVTVPILFLSVLGAVGLATDNVQAAELDTQPETTTVQPNNPDLQSEKETPKTAVSEEATVQKDTTSQPTKVEEVAPENKGTEQSSATPNDTTNAQQPTVGAEKSAQEQPVVSPETTNEPLGQPTEVAPAENEVNKSTSIPKEFETPDVDKAVDEVKKDPNITVVEKPAEDLGNVSSKDLAAKEKEVDQLQKEQAKKIAQQAAELKAKNEKIAKENAEIAAKNKAEKERXXKEVAEYNKHKNENSYVNEAISKNLVFDQSVVTKDTKISSIKGGKFIKATDFNKVNAGDSKDIFTKLRKDMGGKXTGNFQNSFVKEANLGSNGGYAVLLEKNKPVTVTYTGLNASYLGRKITKAEFVYELQSSPSQSGTLNAVFSNDPIITAFIGTNRVNGKDVKTRLTIKFFDASGKEVLPDKDSPFAYALSSLNSSLTNKGGHAEFVSDFGANNAFKYINGSYVKKQADGKFYSPEDIDYGTGPSGLKNSDWDAVGHKNAYFGSGVGLANGRISFSFGMTTKGKSNVPVSSAQWFAFXTNLNAQSVKPIFNYGNPKEPEKATIEFNXYKANVVPVLVPNKEVTDGQKNXNDLNVXRGDSLQYIVTGDTTELAKVDPKTVTKQGIRDTFDAEKVTIDLSKVKVYQADASLNXKDXKAVAAAINSGXAKDVTASYXLNLDQNTVTAMMKTNADGSVVLAMGYKYLLVLPFVVKNVEGDFENTAVQLTXDGETVTNTVINHVPGSNPSKDVKADKNGTVGSVSLHDKDIPLQTKIYYEVKSSERPANYGGXTEEWGMNDVLDTTHDRFTGKWHAITXYDLKVGXKTLKAGTDISAYILLENKDNKDLTFTMNQALLAALNEGSNKVGKQAWSVYLEVERXKTGDVENTQTENYNKELVRSNTVVTHTPDDPKPTKAVHNKKGEXIXHGKVARGDVLSYEMTWDLKGYDKDFAFDTVDLATGVSFFDDYDETXVTPIKDLLRVKDSKGXDITNQFTISWDDAKGTVTXSAKDPQAFILAXGGQELRVTLPTKVKADVSGDVYNSAEQNTFGQRIKTNTVVNHIPKVXPKKDVVIKVGDKQSQNGATIKLGEXFFYEFTSSDIPAEYAGVVEEWSISDKLDVKHDKFSGQWSVFANSNFVLADGTKVNKGDDISKLFTMTFEQGVVKITASQAFXDAMNLKENKNVAHSWKAFIGVERIAAGDVYNTIEESFNNEKIKTNTVVTHTPEKPQTPPEKTVIVPPTPKTPQAPVEPLVVEKASVVPELPQTGEKQNVLLTVAGSLAAMLGLAGLGFKRRKETK

SEQ ID NO: 235 - DNA, 3802 bp; double-stranded, linear
tgattcttgaagcaacaaatgaaagcaaaaaaacaatataagacatataaagctaagaatcactgggtaactgtccctattctttttctaagtgtgttaggagccgtaggattagctactgataatgtacaagccgcggaattagatacgcaaccagaaacaacgacggttcaacccaataaccccgacctgcagtcagaaaaggaaacacctaaaacggcagtatctgaagaagcaacagtacaaaaagacactacttctcaaccgaccaaagtagaagaagtagcgccagaaaataaaggtactgaacaaagttcagctaccccaaatgataccacaaacgcgcaacaaccaacagtaggagctgaaaaatcagcacaagaacaaccagtagtaagccctgaaacaaccaatgaacctctagggcagccaacagaagttgcaccagctgaaaatgaagtgaataaatcaacgtccattcctaaagaatttgaaacaccagacgttgataaagcagttgatgaagtaaaaaaagatccaaacattaccgttgttgaaaaaccagcagaagacttaggcaacgtttcttctaaagatttagctgcaaaagaaaaagaagtagaccaactacaaaaagaacaagcgaaaaagattgcccaacaagcagctgaattaaaagccaaaaatgaaaaaattgccaaagaaaatgcagaaattgcggcaaaaaacaaagcngaaaaagagcgntanganaaagaagtcgcngaatacaacaagcataagaacgaaaacagctatgtcaatgaagcgattagtaaaaacctagtgttcgatcaatctgtcgtgacgaaagacactaaaatttcgtcgattaaaggcggaaaatttatcaaagcaactgattttaataaagtaaatgcaggggattcaaaagatatctttacaaaattacggaaagatatgggngggaaagntactggcaacttccagaattcctttgtaaaagaggcaaatcttgggtctaatggtgggtatgcggttcttttagaaaaaaataaaccagtgacagtgacctatacaggactaaacgctagttatttaggacgtaaaattacaaaagcagaatttgtttatgaactacaatcctcaccaagccaaagtggaacgttaaatgcagtattttcaaacgatccgattatcacngcttttattggtacaaacagagtcaatggtaaggatgttaaaacacgcttaacgattaagttctttgatgcgtcaggtaaagaagtactaccagataaagatagtccatttgcgtatgcgctgtcttctttaaattcaagtttaacgaataaaggtggccatgcggaatttgtttctgattttggggcnaacaatgcgttcaaatacattaatggntcntatgtgaaaaaacaagcggatggaaaattttactcaccggaagatattgactatggcacaggaccttctggattgaaaaatagtgattgggacgctgtaggtcacaagaatgcctactttggttcaggtgtaggtctagcnaatggncgtatttccttttcttttggtatgacaacaaaaggaaaaagtaatgtgcctgtatctagtgcgcaatggtttgcctttagnactaacttaaatgcgcaatcagtgaagcctattttcaattatgggaatccaaaagaaccagaaaaagcaacgattgaattcaatngatacaaagccaatgtcgttcctgtncttgtgccnaataaagaagtcactgatggncagaaaaatntcaatgatttaaatgtgaancgtggcgattctttacaatacattgtgacaggggatacgacagaacttgccaaagtagatccaaaaacagtaacnaaacaagggattcgagatacntttgatgcagaaaaagtgacgattgatttatccaaagtgaaagtttatcaagcagacgcaagtctnaacganaaagactnaaaagctgttgctgcagcnattaattcaggaanagctaaagacgtgactgcttcttatganctcaatttagatcaaaacaccgtcacagcaatgatgaaaaccaacgcngacggntcngttgttttagcaatggggtataaatatttacttgtcttgccgtttgtagtgaaaaatgtagaaggcgattttgaaaatacagctgttcagctgacaaangatggngaaacggtaacaaatacagtgattaaccatgtgccaggtagtaatccttccaaagatgtaaaagcagataaaaacggtacagttggcagtgtttctctacatgataaagatattccgttacaaacaaaaatttattatgaagtgaaatcttccgaacgtccagcnaactatggcggaatnacngaagaatggggcatgaatgatgtcttggacacgacccatgatcgtttcacaggnaaatggcacgctattacnaantatgaccttaaagtagggganaaaacgttaaaagcaggaacagatatttctgcctacattcttttagaaaacaaagacaataaagacttgacgtttacnatgaatcaagcattattggcngcnttaaatgaaggaagcaataaagtaggcaaacaagcttggtctgtgtatctggaagtcgaacggatnaaaacaggtgacgtagaaaacacgcaaacagaaaactacaacaaagagcttgtncgttctaatacngtggtgacgcatacncctgatgatccaaaaccaaccaaagccgttcataacaagaaaggggaaganattaancatggaaaagtngctcgtggtgatgttctttcttatgaaatgacntgggacttaaaagggtacgataaagactttgcctttgatacagtcgatcttgcgacaggcgtttctttcttcgatgattacgatgaaacgaangtgacaccaatcaaagacttacttcgtgtcaaagattctaaaggggnagacattacgaaccagttcacgatctcntgggacgatgccaaaggcacggtgacnatntctgccaaagacccacaagcctttattctagcgnatggtgggcaagaattgcgtgtaacnctccctacaaaagtcaaagccgatgtttctggngatgtttataattcagcggaacaaaatacatttggncaacgaattaaaaccaatacngttgtcaaccatattccaaaagtgaancctaaaaaagacgtggttattaaagtnggtgacaaacaaagtcaaaatggngccacaatcaaattaggggagaanttcttctatgaatttacaagtagtgacattcctgcagaatacgctggngttgtggaagaatggtcgattagcgataaactagacgtcaaacatgacaaatttagtggccaatggtctgtgtttgccaattctaattttgttttagcagacggaaccaaagtgaataaaggggacgacatttcgaaactattcacgatgacctttgaacaaggggtagtgaaaatcacggccagtcaagcctttttngatgcgatgaatctaaaagaaaacaaaaacgttgcacactcatggaaagcgttcattggtgtagaacgaattgcggcaggagacgtttacaacacaatcgaagaatctttcaacaatgagaagattaaaacnaatacggtagtgacncatacgccagaaaaaccacaaacnccaccagaaaaaacagtgattgtaccaccaacaccaaaaacaccgcaagcaccagtagagccattagtggtagaaaaggcaagtg

SEQ ID NO: 236 - protein, 1223 aa
AELDTQPETTTVQPNNPDLQSEKETPKTAVSEEATVQKDTTSQPTKVEEVAPENKGTEQSSATPNDTTNAQQPTVGAEKSAQEQPVVSPETTNEPLGQPTEVAPAENEVNKSTSIPKEFETPDVDKAVDEVKKDPNITVVEKPAEDLGNVSSKDLAAKEKEVDQLQKEQAKKIAQQAAELKAKNEKIAKENAEIAAKNKAEKERXXKEVAEYNKHKNENSYVNEAISKNLVFDQSVVTKDTKISSIKGGKFIKATDFNKVNAGDSKDIFTKLRKDMGGKXTGNFQNSFVKEANLGSNGGYAVLLEKNKPVTVTYTGLNASYLGRKITKAEFVYELQSSPSQSGTLNAVFSNDPIITAFIGTNRVNGKDVKTRLTIKFFDASGKEVLPDKDSPFAYALSSLNSSLTNKGGHAEFVSDFGANNAFKYINGSYVKKQADGKFYSPEDIDYGTGPSGLKNSDWDAVGHKNAYFGSGVGLANGRISFSFGMTTKGKSNVPVSSAQWFAFXTNLNAQSVKPIFNYGNPKEPEKATIEFNXYKANVVPVLVPNKEVTDGQKNXNDLNVXRGDSLQYIVTGDTTELAKVDPKTVTKQGIRDTFDAEKVTIDLSKVKVYQADASLNXKDXKAVAAAINSGXAKDVTASYXLNLDQNTVTAMMKTNADGSVVLAMGYKYLLVLPFVVKNVEGDFENTAVQLTXDGETVTNTVINHVPGSNPSKDVKADKNGTVGSVSLHDKDIPLQTKIYYEVKSSERPANYGGXTEEWGMNDVLDTTHDRFTGKWHAITXYDLKVGXKTLKAGTDISAYILLENKDNKDLTFTMNQALLAALNEGSNKVGKQAWSVYLEVERXKTGDVENTQTENYNKELVRSNTVVTHTPDDPKPTKAVHNKKGEXIXHGKVARGDVLSYEMTWDLKGYDKDFAFDTVDLATGVSFFDDYDETXVTPIKDLLRVKDSKGXDITNQFTISWDDAKGTVTXSAKDPQAFILAXGGQELRVTLPTKVKADVSGDVYNSAEQNTFGQRIKTNTVVNHIPKVXPKKDVVIKVGDKQSQNGATIKLGEXFFYEFTSSDIPAEYAGVVEEWSISDKLDVKHDKFSGQWSVFANSNFVLADGTKVNKGDDISKLFTMTFEQGVVKITASQAFXDAMNLKENKNVAHSWKAFIGVERIAAGDVYNTIEESFNNEKIKTNTVVTHTPEKPQTPPEKTVIVPPTPKTPQAPVEPLVVEKASV

SEQ ID NO: 237 - DNA, 3924 bp; double-stranded, linear; identical to SEQ ID NO: 233

SEQ ID NO: 238 - protein, 1301 aa; identical to SEQ ID NO: 234

SEQ ID NO: 239 - DNA, 1819 bp; double-stranded, linear
ggaattagatacgcaaccagaaacaacgacggttcaacccaataaccccgacctgcagtcagaaaaggaaacacctaaaacggcagtatctgaagaagcaacagtacaaaaagacactacttctcaaccgaccaaagtagaagaagtagcgccagaaaataaaggtactgaacaaagttcagctaccccaaatgataccacaaacgcgcaacaaccaacagtaggagctgaaaaatcagcacaagaacaaccagtagtaagccctgaaacaaccaatgaacctctagggcagccaacagaagttgcaccagctgaaaatgaagtgaataaatcaacgtccattcctaaagaatttgaaacaccagacgttgataaagcagttgatgaagtaaaaaaagatccaaacattaccgttgttgaaaaaccagcagaagacttaggcaacgtttcttctaaagatttagctgcaaaagaaaaagaagtagaccaactacaaaaagaacaagcgaaaaagattgcccaacaagcagctgaattaaaagccaaaaatgaaaaaattgccaaagaaaatgcagaaattgcggcaaaaaacaaagcngaaaaagagcgntanganaaagaagtcgcngaatacaacaagcataagaacgaaaacagctatgtcaatgaagcgattagtaaaaacctagtgttcgatcaatctgtcgtgacgaaagacactaaaatttcgtcgattaaaggcggaaaatttatcaaagcaactgattttaataaagtaaatgcaggggattcaaaagatatctttacaaaattacggaaagatatgggngggaaagntactggcaacttccagaattcctttgtaaaagaggcaaatcttgggtctaatggtgggtatgcggttcttttagaaaaaaataaaccagtgacagtgacctatacaggactaaacgctagttatttaggacgtaaaattacaaaagcagaatttgtttatgaactacaatcctcaccaagccaaagtggaacgttaaatgcagtattttcaaacgatccgattatcacngcttttattggtacaaacagagtcaatggtaaggatgttaaaacacgcttaacgattaagttctttgatgcgtcaggtaaagaagtactaccagataaagatagtccatttgcgtatgcgctgtcttctttaaattcaagtttaacgaataaaggtggccatgcggaatttgtttctgattttggggcnaacaatgcgttcaaatacattaatggntcntatgtgaaaaaacaagcggatggaaaattttactcaccggaagatattgactatggcacaggaccttctggattgaaaaatagtgattgggacgctgtaggtcacaagaatgcctactttggttcaggtgtaggtctagcnaatggncgtatttccttttcttttggtatgacaacaaaaggaaaaagtaatgtgcctgtatctagtgcgcaatggtttgcctttagnactaacttaaatgcgcaatcagtgaagcctattttcaattatgggaatccaaaagaaccagaaaaagcaacgattgaattcaatngatacaaagccaatgtcgttcctgtncttgtgccnaataaagaagtcactgatggncagaaaaatntcaatgatttaaatgtgaancgtggcgattctttacaatacattgtgacaggggatacgacagaacttgccaaagtagatccaaaaacagtaacnaaacaagggattcgagatacntttgatgcagaaaaagtgacgattgatttatccaaagtg

SEQ ID NO: 240 - protein, 606 aa
ELDTQPETTTVQPNNPDLQSEKETPKTAVSEEATVQKDTTSQPTKVEEVAPENKGTEQSSATPNDTTNAQQPTVGAEKSAQEQPVVSPETTNEPLGQPTEVAPAENEVNKSTSIPKEFETPDVDKAVDEVKKDPNITVVEKPAEDLGNVSSKDLAAKEKEVDQLQKEQAKKIAQQAAELKAKNEKIAKENAEIAAKNKAEKERXXKEVAEYNKHKNENSYVNEAISKNLVFDQSVVTKDTKISSIKGGKFIKATDFNKVNAGDSKDIFTKLRKDMGGKXTGNFQNSFVKEANLGSNGGYAVLLEKNKPVTVTYTGLNASYLGRKITKAEFVYELQSSPSQSGTLNAVFSNDPIITAFIGTNRVNGKDVKTRLTIKFFDASGKEVLPDKDSPFAYALSSLNSSLTNKGGHAEFVSDFGANNAFKYINGSYVKKQADGKFYSPEDIDYGTGPSGLKNSDWDAVGHKNAYFGSGVGLANGRISFSFGMTTKGKSNVPVSSAQWFAFXTNLNAQSVKPIFNYGNPKEPEKATIEFNXYKANVVPVLVPNKEVTDGQKNXNDLNVXRGDSLQYIVTGDTTELAKVDPKTVTKQGIRDTFDAEKVTIDLSKV

SEQ ID NO: 241 - DNA, 3924 bp; double-stranded, linear; identical to SEQ ID NO: 233

SEQ ID NO: 242 - protein, 1301 aa; identical to SEQ ID NO: 234

SEQ ID NO: 243 - DNA, 1993 bp; double-stranded, linear
agtgacgattgatttatccaaagtgaaagtttatcaagcagacgcaagtctnaacganaaagactnaaaagctgttgctgcagcnattaattcaggaanagctaaagacgtgactgcttcttatganctcaatttagatcaaaacaccgtcacagcaatgatgaaaaccaacgcngacggntcngttgttttagcaatggggtataaatatttacttgtcttgccgtttgtagtgaaaaatgtagaaggcgattttgaaaatacagctgttcagctgacaaangatggngaaacggtaacaaatacagtgattaaccatgtgccaggtagtaatccttccaaagatgtaaaagcagataaaaacggtacagttggcagtgtttctctacatgataaagatattccgttacaaacaaaaatttattatgaagtgaaatcttccgaacgtccagcnaactatggcggaatnacngaagaatggggcatgaatgatgtcttggacacgacccatgatcgtttcacaggnaaatggcacgctattacnaantatgaccttaaagtagggganaaaacgttaaaagcaggaacagatatttctgcctacattcttttagaaaacaaagacaataaagacttgacgtttacnatgaatcaagcattattggcngcnttaaatgaaggaagcaataaagtaggcaaacaagcttggtctgtgtatctggaagtcgaacggatnaaaacaggtgacgtagaaaacacgcaaacagaaaactacaacaaagagcttgtncgttctaatacngtggtgacgcatacncctgatgatccaaaaccaaccaaagccgttcataacaagaaaggggaaganattaancatggaaaagtngctcgtggtgatgttctttcttatgaaatgacntgggacttaaaagggtacgataaagactttgcctttgatacagtcgatcttgcgacaggcgtttctttcttcgatgattacgatgaaacgaangtgacaccaatcaaagacttacttcgtgtcaaagattctaaaggggnagacattacgaaccagttcacgatctcntgggacgatgccaaaggcacggtgacnatntctgccaaagacccacaagcctttattctagcgnatggtgggcaagaattgcgtgtaacnctccctacaaaagtcaaagccgatgtttctggngatgtttataattcagcggaacaaaatacatttggncaacgaattaaaaccaatacngttgtcaaccatattccaaaagtgaancctaaaaaagacgtggttattaaagtnggtgacaaacaaagtcaaaatggngccacaatcaaattaggggagaanttcttctatgaatttacaagtagtgacattcctgcagaatacgctggngttgtggaagaatggtcgattagcgataaactagacgtcaaacatgacaaatttagtggccaatggtctgtgtttgccaattctaattttgttttagcagacggaaccaaagtgaataaaggggacgacatttcgaaactattcacgatgacctttgaacaaggggtagtgaaaatcacggccagtcaagcctttttngatgcgatgaatctaaaagaaaacaaaaacgttgcacactcatggaaagcgttcattggtgtagaacgaattgcggcaggagacgtttacaacacaatcgaagaatctttcaacaatgagaagattaaaacnaatacggtagtgacncatacgccagaaaaaccacaaacnccaccagaaaaaacagtgattgtaccaccaacaccaaaaacaccgcaagcaccagtagagccattagtggtagaaaaggcaagtgtngtgccagaattgccgcaaacaggcgaaaaacaaaatgtcttattaacggtagctggtagtttagccgcaatgcttggcttagcaggcttaggctttaaacgtagaaaagaaacaaaataa

SEQ ID NO: 244 - protein, 624 aa
VTIDLSKVKVYQADASLNXKDXKAVAAAINSGXAKDVTASYXLNLDQNTVTAMMKTNADGSVVLAMGYKYLLVLPFVVKNVEGDFENTAVQLTXDGETVTNTVINHVPGSNPSKDVKADKNGTVGSVSLHDKDIPLQTKIYYEVKSSERPANYGGXTEEWGMNDVLDTTHDRFTGKWHAITXYDLKVGXKTLKAGTDISAYILLENKDNKDLTFTMNQALLAALNEGSNKVGKQAWSVYLEVERXKTGDVENTQTENYNKELVRSNTVVTHTPDDPKPTKAVHNKKGEXIXHGKVARGDVLSYEMTWDLKGYDKDFAFDTVDLATGVSFFDDYDETXVTPIKDLLRVKDSKGXDITNQFTISWDDAKGTVTXSAKDPQAFILAXGGQELRVTLPTKVKADVSGDVYNSAEQNTFGQRIKTNTVVNHIPKVXPKKDVVIKVGDKQSQNGATIKLGEXFFYEFTSSDIPAEYAGVVEEWSISDKLDVKHDKFSGQWSVFANSNFVLADGTKVNKGDDISKLFTMTFEQGVVKITASQAFXDAMNLKENKNVAHSWKAFIGVERIAAGDVYNTIEESFNNEKIKTNTVVTHTPEKPQTPPEKTVIVPPTPKTPQAPVEPLVVEKASV

SEQ ID NO: 245 - DNA, 2916 bp; double-stranded, linear
tagcgaaagaaaatagggaggattaaaatgtttaagaaagcaacgaaattattatcgacaatggtgattgtcgctggaacagttgtgggaaatttcagtcccacattggctttagctgaagaagcggttaaagcaggagatacagaaggaatgaccaatacggtgaaagtgaaagacgacagtctggctgattgtaaacggatattggaaggacaagctactttcccagttcaagcgggtgaaacggaaccagtcgatttagtagttgttgaagatgctagtggtagtttttcagataattttccacatgtaagacaagcgattgatgaagtggttcaaggcttatctgatcaagaccgcgtgatgctggcttcatatcgcggcggaaaacaatttatgtttcctgatggaaagacaaaaattaattcagctgattatgatatgaatgtgcgcgtcaatacgcaattgacttatgataaaagccaatttgtctctggttttggagacgttcggacgtatggtggtacgccaaccgccccaggattgaaactcgctttagatacgtacaatcaaacacacggagatttaacgaatcgaaaaacgtatttcctattagtgacagatggggtcgctaatacacgtttagatggttacttgcataagaccaataccaatgattcaatcaatgaatatccagatccaagacatcctcttcaagtctcagtggaatatagtaatgactaccaaggtgcagcagcagaagttttagcgttaaaccaagaaattactaaccaaggctatgaaatgattaatgcgtattgggaaagtgttgaatctttaagttcagtgaattcatactttgataaatataaaacagaagtgggtccttttgtaaaacaagagttgcaacaagggtctagcacaccagaagattttattacaagccaatctattgatgattttacaacccaattaaaacaaattgtcaaagatcgtctggcgcaatcgacaccagcaacagcttcattaacgattgccaatcaatttgatattcaatctgcgaccgctacggacgatgctggaaatgatgtgcctgttcaaattaacggacaaaccatttcagcaactagtacagaaggttacgtaggaaacatcacgattcactacgaagtcaaagaaaatacagcgattgatgcagcaacccttgtaagtagtgggacaatgaatcaaggaacaattgctaaggaatttccagaagcgacgattcctaaaaatgacaatgcgcatgcgtgtgacgtgacgccagaagatccaacgattacaaaagatatcgaaaatcaagaacacttagatttaaccaatcgtgaagatagtttcgattggcatgtcaaaacagcctttggcaacgaaaccagtacttggacccaagccagcatggtggatgacattaataaagtgctagatatcattgatgtgaaagtcaccgacgaaaatggtaaagatgttacagctaacggcacagtaacacaagaaaataacaaagtaacttttgaaatgaacaaacaagcagacagctatgactatttaagtggtcatacgtatacaatgactatcaccactaaaattaaaactgacgcaacggacgaagaattagcgccttacattgaacaaggcgggattcccaaccaagccgacttaaactttggcaatgaaggtgacgtgttacattccaacaaaccaaccgtaacaccaccgccagttgatccaaatattgctaaagacgtagaaggacaagaacatttagatttaaccaaccgcgatcaagaatttaaatggaacgtcaaaacagctttcggtaacgaaacaagcacttggacccaagccagcatggtagatgacattaataaagtgttagacatcactgatgtaaaagtcacagatgaaaatggtaaagatgttacagctaacggcaaagtaacacaagaaaataacaaagtaacttttgaaatgaacaancaagcngacagctatgactatttaagtggtcatacgtacacaatgaccattactactaaaatcaaagctagcgcaacggacgaagaattagcaccttatattgaacaaggtggcattcccaaccaagccgacttgaactttggcaacgaaggtgacgtgttgcattccaacaaaccaaccgtaacaccacctgcaccaacgccagaagatccaacgattacaaaagatatcgaaggccaagaacatttagatttaaccaaccgtgaccaagaatttaaatggaacgtcaaaacagctttcggtaacgaaacaagcacatggacccaagccagcatggtggatgacattaataaagtgttagacatcacagacgtgaaagttnctgangaaaatggcaaagatgttacagataatggcatagtaacacaagaaaataacaaagtaacttttactatgaacaaaaaagatgacagctactcttacttagctggtcatacatacacaatgactattaccactaaaattaaaactgacgcaacggatgaagaattagcgccttatattgaacaaggcgggattcccaaccaagccgacttaaactttggcaacgaaggtgacgtgttgcattccaacaagccaaccgtaacaccgcctgcaccaacgccagaagacccaaaaaaacctgaacctaaacaaccgctaaaaccgaaaaaaccgttgacgcctacaaatcatcaagcaccaacgaacccagtcaattttggaaaatcagcaagtaaaggaattcatttaccaatgactaatacaacagtaaatccactttacatgatcgcaggtttaattgtccttatagtggctattagctttggcataacaaaaaataaaaaaagaaaaaattag

SEQ ID NO: 246 - protein, 962 aa
MFKKATKLLSTMVIVAGTVVGNFSPTLALAEEAVKAGDTEGMTNTVKVKDDSLADCKRILEGQATFPVQAGETEPVDLVVVEDASGSFSDNFPHVRQAIDEVVQGLSDQDRVMLASYRGGKQFMFPDGKTKINSADYDMNVRVNTQLTYDKSQFVSGFGDVRTYGGTPTAPGLKLALDTYNQTHGDLTNRKTYFLLVTDGVANTRLDGYLHKTNTNDSINEYPDPRHPLQVSVEYSNDYQGAAAEVLALNQEITNQGYEMINAYWESVESLSSVNSYFDKYKTEVGPFVKQELQQGSSTPEDFITSQSIDDFTTQLKQIVKDRLAQSTPATASLTIANQFDIQSATATDDAGNDVPVQINGQTISATSTEGYVGNITIHYEVKENTAIDAATLVSSGTMNQGTIAKEFPEATIPKNDNAHACDVTPEDPTITKDIENQEHLDLTNREDSFDWHVKTAFGNETSTWTQASMVDDINKVLDIIDVKVTDENGKDVTANGTVTQENNKVTFEMNKQADSYDYLSGHTYTMTITTKIKTDATDEELAPYIEQGGIPNQADLNFGNEGDVLHSNKPTVTPPPVDPNIAKDVEGQEHLDLTNRDQEFKWNVKTAFGNETSTWTQASMVDDINKVLDITDVKVTDENGKDVTANGKVTQENNKVTFEMNXQADSYDYLSGHTYTMTITTKIKASATDEELAPYIEQGGIPNQADLNFGNEGDVLHSNKPTVTPPAPTPEDPTITKDIEGQEHLDLTNRDQEFKWNVKTAFGNETSTWTQASMVDDINKVLDITDVKVXXENGKDVTDNGIVTQENNKVTFTMNKKDDSYSYLAGHTYTMTITTKIKTDATDEELAPYIEQGGIPNQADLNFGNEGDVLHSNKPTVTPPAPTPEDPKKPEPKQPLKPKKPLTPTNHQAPTNPVNFGKSASKGIHLPMTNTTVNPLYMIAGLIVLIVAISFGITKNKKRKN

SEQ ID NO: 247 - DNA, 2677 bp; double-stranded, linear
ggttaaagcaggagatacagaaggaatgaccaatacggtgaaagtgaaagacgacagtctggctgattgtaaacggatattggaaggacaagctactttcccagttcaagcgggtgaaacggaaccagtcgatttagtagttgttgaagatgctagtggtagtttttcagataattttccacatgtaagacaagcgattgatgaagtggttcaaggcttatctgatcaagaccgcgtgatgctggcttcatatcgcggcggaaaacaatttatgtttcctgatggaaagacaaaaattaattcagctgattatgatatgaatgtgcgcgtcaatacgcaattgacttatgataaaagccaatttgtctctggttttggagacgttcggacgtatggtggtacgccaaccgccccaggattgaaactcgctttagatacgtacaatcaaacacacggagatttaacgaatcgaaaaacgtatttcctattagtgacagatggggtcgctaatacacgtttagatggttacttgcataagaccaataccaatgattcaatcaatgaatatccagatccaagacatcctcttcaagtctcagtggaatatagtaatgactaccaaggtgcagcagcagaagttttagcgttaaaccaagaaattactaaccaaggctatgaaatgattaatgcgtattgggaaagtgttgaatctttaagttcagtgaattcatactttgataaatataaaacagaagtgggtccttttgtaaaacaagagttgcaacaagggtctagcacaccagaagattttattacaagccaatctattgatgattttacaacccaattaaaacaaattgtcaaagatcgtctggcgcaatcgacaccagcaacagcttcattaacgattgccaatcaatttgatattcaatctgcgaccgctacggacgatgctggaaatgatgtgcctgttcaaattaacggacaaaccatttcagcaactagtacagaaggttacgtaggaaacatcacgattcactacgaagtcaaagaaaatacagcgattgatgcagcaacccttgtaagtagtgggacaatgaatcaaggaacaattgctaaggaatttccagaagcgacgattcctaaaaatgacaatgcgcatgcgtgtgacgtgacgccagaagatccaacgattacaaaagatatcgaaaatcaagaacacttagatttaaccaatcgtgaagatagtttcgattggcatgtcaaaacagcctttggcaacgaaaccagtacttggacccaagccagcatggtggatgacattaataaagtgctagatatcattgatgtgaaagtcaccgacgaaaatggtaaagatgttacagctaacggcacagtaacacaagaaaataacaaagtaacttttgaaatgaacaaacaagcagacagctatgactatttaagtggtcatacgtatacaatgactatcaccactaaaattaaaactgacgcaacggacgaagaattagcgccttacattgaacaaggcgggattcccaaccaagccgacttaaactttggcaatgaaggtgacgtgttacattccaacaaaccaaccgtaacaccaccgccagttgatccaaatattgctaaagacgtagaaggacaagaacatttagatttaaccaaccgcgatcaagaatttaaatggaacgtcaaaacagctttcggtaacgaaacaagcacttggacccaagccagcatggtagatgacattaataaagtgttagacatcactgatgtaaaagtcacagatgaaaatggtaaagatgttacagctaacggcaaagtaacacaagaaaataacaaagtaacttttgaaatgaacaancaagcngacagctatgactatttaagtggtcatacgtacacaatgaccattactactaaaatcaaagctagcgcaacggacgaagaattagcaccttatattgaacaaggtggcattcccaaccaagccgacttgaactttggcaacgaaggtgacgtgttgcattccaacaaaccaaccgtaacaccacctgcaccaacgccagaagatccaacgattacaaaagatatcgaaggccaagaacatttagatttaaccaaccgtgaccaagaatttaaatggaacgtcaaaacagctttcggtaacgaaacaagcacatggacccaagccagcatggtggatgacattaataaagtgttagacatcacagacgtgaaagttnctgangaaaatggcaaagatgttacagataatggcatagtaacacaagaaaataacaaagtaacttttactatgaacaaaaaagatgacagctactcttacttagctggtcatacatacacaatgactattaccactaaaattaaaactgacgcaacggatgaagaattagcgccttatattgaacaaggcgggattcccaaccaagccgacttaaactttggcaacgaaggtgacgtgttgcattccaacaagccaaccgtaacaccgcctgcaccaacgccagaagacccaaaaaaacctgaacctaaacaaccgctaaaaccgaaaaaaccgttgacgcctacaaatcatcaagcaccaacgaacccagtcaattttggaaaatcagcaagtaaaggaatt

SEQ ID NO: 248 - protein, 894 aa
AVKAGDTEGMTNTVKVKDDSLADCKRILEGQATFPVQAGETEPVDLVVVEDASGSFSDNFPHVRQAIDEVVQGLSDQDRVMLASYRGGKQFMFPDGKTKINSADYDMNVRVNTQLTYDKSQFVSGFGDVRTYGGTPTAPGLKLALDTYNQTHGDLTNRKTYFLLVTDGVANTRLDGYLHKTNTNDSINEYPDPRHPLQVSVEYSNDYQGAAAEVLALNQEITNQGYEMINAYWESVESLSSVNSYFDKYKTEVGPFVKQELQQGSSTPEDFITSQSIDDFTTQLKQIVKDRLAQSTPATASLTIANQFDIQSATATDDAGNDVPVQINGQTISATSTEGYVGNITIHYEVKENTAIDAATLVSSGTMNQGTIAKEFPEATIPKNDNAHACDVTPEDPTITKDIENQEHLDLTNREDSFDWHVKTAFGNETSTWTQASMVDDINKVLDIIDVKVTDENGKDVTANGTVTQENNKVTFEMNKQADSYDYLSGHTYTMTITTKIKTDATDEELAPYIEQGGIPNQADLNFGNEGDVLHSNKPTVTPPPVDPNIAKDVEGQEHLDLTNRDQEFKWNVKTAFGNETSTWTQASMVDDINKVLDITDVKVTDENGKDVTANGKVTQENNKVTFEMNXQADSYDYLSGHTYTMTITTKIKASATDEELAPYIEQGGIPNQADLNFGNEGDVLHSNKPTVTPPAPTPEDPTITKDIEGQEHLDLTNRDQEFKWNVKTAFGNETSTWTQASMVDDINKVLDITDVKVXXENGKDVTDNGIVTQENNKVTFTMNKKDDSYSYLAGHTYTMTITTKIKTDATDEELAPYIEQGGIPNQADLNFGNEGDVLHSNKPTVTPPAPTPEDPKKPEPKQPLKPKKPLTPTNHQAPTNPVNFGKSASKGIH

SEQ ID NO: 249 - DNA, 2916 bp; double-stranded, linear; identical to SEQ ID NO: 245

SEQ ID NO: 250 - protein, 962 aa; identical to SEQ ID NO: 246

SEQ ID NO: 251 - DNA, 1358 bp; double-stranded, linear
ggttaaagcaggagatacagaaggaatgaccaatacggtgaaagtgaaagacgacagtctggctgattgtaaacggatattggaaggacaagctactttcccagttcaagcgggtgaaacggaaccagtcgatttagtagttgttgaagatgctagtggtagtttttcagataattttccacatgtaagacaagcgattgatgaagtggttcaaggcttatctgatcaagaccgcgtgatgctggcttcatatcgcggcggaaaacaatttatgtttcctgatggaaagacaaaaattaattcagctgattatgatatgaatgtgcgcgtcaatacgcaattgacttatgataaaagccaatttgtctctggttttggagacgttcggacgtatggtggtacgccaaccgccccaggattgaaactcgctttagatacgtacaatcaaacacacggagatttaacgaatcgaaaaacgtatttcctattagtgacagatggggtcgctaatacacgtttagatggttacttgcataagaccaataccaatgattcaatcaatgaatatccagatccaagacatcctcttcaagtctcagtggaatatagtaatgactaccaaggtgcagcagcagaagttttagcgttaaaccaagaaattactaaccaaggctatgaaatgattaatgcgtattgggaaagtgttgaatctttaagttcagtgaattcatactttgataaatataaaacagaagtgggtccttttgtaaaacaagagttgcaacaagggtctagcacaccagaagattttattacaagccaatctattgatgattttacaacccaattaaaacaaattgtcaaagatcgtctggcgcaatcgacaccagcaacagcttcattaacgattgccaatcaatttgatattcaatctgcgaccgctacggacgatgctggaaatgatgtgcctgttcaaattaacggacaaaccatttcagcaactagtacagaaggttacgtaggaaacatcacgattcactacgaagtcaaagaaaatacagcgattgatgcagcaacccttgtaagtagtgggacaatgaatcaaggaacaattgctaaggaatttccagaagcgacgattcctaaaaatgacaatgcgcatgcgtgtgacgtgacgccagaagatccaacgattacaaaagatatcgaaaatcaagaacacttagatttaaccaatcgtgaagatagtttcgattggcatgtcaaaacagcctttggcaacgaaaccagtacttggacccaagccagcatggtggatgacattaataaagtgctagatatcattgatgtgaaagtca

SEQ ID NO: 252 - protein, 454 aa
AVKAGDTEGMTNTVKVKDDSLADCKRILEGQATFPVQAGETEPVDLVVVEDASGSFSDNFPHVRQAIDEVVQGLSDQDRVMLASYRGGKQFMFPDGKTKINSADYDMNVRVNTQLTYDKSQFVSGFGDVRTYGGTPTAPGLKLALDTYNQTHGDLTNRKTYFLLVTDGVANTRLDGYLHKTNTNDSINEYPDPRHPLQVSVEYSNDYQGAAAEVLALNQEITNQGYEMINAYWESVESLSSVNSYFDKYKTEVGPFVKQELQQGSSTPEDFITSQSIDDFTTQLKQIVKDRLAQSTPATASLTIANQFDIQSATATDDAGNDVPVQINGQTISATSTEGYVGNITIHYEVKENTAIDAATLVSSGTMNQGTIAKEFPEATIPKNDNAHACDVTPEDPTITKDIENQEHLDLTNREDSFDWHVKTAFGNETSTWTQASMVDDINKVLDIIDVKVT

SEQ ID NO: 253 - DNA, 2916 bp; double-stranded, linear; identical to SEQ ID NO: 245

SEQ ID NO: 254 - protein, 962 aa; identical to SEQ ID NO: 246

SEQ ID NO: 255 - DNA, 1345 bp; double-stranded, linear
gctagatatcattgatgtgaaagtcaccgacgaaaatggtaaagatgttacagctaacggcacagtaacacaagaaaataacaaagtaacttttgaaatgaacaaacaagcagacagctatgactatttaagtggtcatacgtatacaatgactatcaccactaaaattaaaactgacgcaacggacgaagaattagcgccttacattgaacaaggcgggattcccaaccaagccgacttaaactttggcaatgaaggtgacgtgttacattccaacaaaccaaccgtaacaccaccgccagttgatccaaatattgctaaagacgtagaaggacaagaacatttagatttaaccaaccgcgatcaagaatttaaatggaacgtcaaaacagctttcggtaacgaaacaagcacttggacccaagccagcatggtagatgacattaataaagtgttagacatcactgatgtaaaagtcacagatgaaaatggtaaagatgttacagctaacggcaaagtaacacaagaaaataacaaagtaacttttgaaatgaacaancaagcngacagctatgactatttaagtggtcatacgtacacaatgaccattactactaaaatcaaagctagcgcaacggacgaagaattagcaccttatattgaacaaggtggcattcccaaccaagccgacttgaactttggcaacgaaggtgacgtgttgcattccaacaaaccaaccgtaacaccacctgcaccaacgccagaagatccaacgattacaaaagatatcgaaggccaagaacatttagatttaaccaaccgtgaccaagaatttaaatggaacgtcaaaacagctttcggtaacgaaacaagcacatggacccaagccagcatggtggatgacattaataaagtgttagacatcacagacgtgaaagttnctgangaaaatggcaaagatgttacagataatggcatagtaacacaagaaaataacaaagtaacttttactatgaacaaaaaagatgacagctactcttacttagctggtcatacatacacaatgactattaccactaaaattaaaactgacgcaacggatgaagaattagcgccttatattgaacaaggcgggattcccaaccaagccgacttaaactttggcaacgaaggtgacgtgttgcattccaacaagccaaccgtaacaccgcctgcaccaacgccagaagacccaaaaaaacctgaacctaaacaaccgctaaaaccgaaaaaaccgttgacgcctacaaatcatcaagcaccaacgaacccagtcaattttggaaaatcagcaagtaaaggaatt

SEQ ID NO: 256 - protein, 450 aa
VLDIIDVKVTDENGKDVTANGTVTQENNKVTFEMNKQADSYDYLSGHTYTMTITTKIKTDATDEELAPYIEQGGIPNQADLNFGNEGDVLHSNKPTVTPPPVDPNIAKDVEGQEHLDLTNRDQEFKWNVKTAFGNETSTWTQASMVDDINKVLDITDVKVTDENGKDVTANGKVTQENNKVTFEMNXQADSYDYLSGHTYTMTITTKIKASATDEELAPYIEQGGIPNQADLNFGNEGDVLHSNKPTVTPPAPTPEDPTITKDIEGQEHLDLTNRDQEFKWNVKTAFGNETSTWTQASMVDDINKVLDITDVKVXXENGKDVTDNGIVTQENNKVTFTMNKKDDSYSYLAGHTYTMTITTKIKTDATDEELAPYIEQGGIPNQADLNFGNEGDVLHSNKPTVTPPAPTPEDPKKPEPKQPLKPKKPLTPTNHQAPTNPVNFGKSASKGIH

SEQ ID NO: 257 - DNA, 4977 bp; double-stranded, linear
taggggaagctaatgatcttggtatttatcgtttattttaaagaaaagagggacgatcagatgaaaaagaaaattgttgaggattttaatcggaaaagtcagcataaaaaatggacaaaacgcaagatgcttaatttagcaatatcaagtggtttattatttacgtcattagcaatccctgtaagtatagctgttacctctggcacaatcagtgcatcagcagcggtcttggatatcgaactattatcaaatgttacgtcaaataatgacagtggcacttcaacgagtaatcgttggacagccgcaaaccaaaatcaaccagttaatttcacggtttctggtggcgctttagcagatgcttccgctgtgtttagtggacaaaaacaagcggtgttagtggttcctcctgagttaagaggaaatgtagctgcagcaggcagcgcagcaatcaataccaatgtcacgattgatctttcaaaagttacttttttgactgccgttttgaatgcagccaatgatttaaccaatgtgattactcaaattaccagtggggcgttagggaatttaactggtgttgatattgatttgacggaagtgaatcgtcaattggaattagttaataacattgaaaacttaggtgctgcttcatttacagctccggaaacgttagcagctgacggctcatacattagtgcaccgattagtgatggtttagggttagttttagcccaaaatgtttcaaacatcttacaagatttgaatgcggcagttcaagctttggaggcaaaaggtaccagtatcccaagtaatcttgtcgccgcagctataaatgcagccttgcttcctgtcaaaggcacggtaaacgtggctgtttcaggtgctttgcctttattagcggttggtggttcaggcgtaaatgagttagtggatgcttctttactaggcacaaccacggttactttaccaactaccgtttcaacacctcaaaatttatccaataatttagatgctcgttttgtaggaacagtcgttcaaacagatcttttagacgttaatttattagcaacagcagacggtgtatccaacatttattttgctgcaggcactactagtgaagtaaccgcaccaacaatcacaggagtaacaggtaattcaacagcaggttacgaagttaaaggaactgccgatgccaatgccacggttgaaatccgaaatgcaggaggcaccgtaataggcacaggtaccgctgatgggacaggagcgtttacagttaccgttcccgcaggtgaagcaggcgccaatgaaacgttaaccgccgtagcgaaaaacgccagcggnacagaaagnacgccaacaacgttccaaacnccagcggatgaagcaaccgtaaccgcaccaacaatcacaggagtgacaggtaattcaacggcaggttacgaagttaaaggaactgccgatgccaatgccacggttgaaatccgaaatgcaggaggcaccgtaataggcacaggtaccgctgatgggacaggagcgtttacagttaccgttcccgcaggtgaagcaggtgccaatgaaacgttaaccgccgtagcgaaaaacgccagcggcacagaaagtacgccaacaacgttccaaacaccagcggatgaagcaaccgtaaccgcaccaacaatcacaggagtgacaggtaattcaacagcaggttacgaagttaaaggaactgccgatgccaatgccacggttgagatccgaaatgcaggaggtgccgtgataggtacaggtactgctgatgggacaggggcatttacagttaccattcccgcaggtgaagcaggtgcgaatgaaacgttaaccgccgtagcgaaaaacgccagcggtacagaaagtacgccaacaacgttccaaacgccagcggatcctaatacgcccgtggcgacgccaattgttgagactgtaacaggtagtacaacaaaaggctatgaggtcaaagggactgctgaagttggcaccaccattgaggttcgcgatgcagctggcacggtccttggtactgcaacaactggaactgacggaaaatatacagtgactttagattcaggaacagcaacagcaaatcaaacgctgagcgttgtagcgaaaaacgctagtggcacggaaagtcaaccagcaacggcgacaacaccagctgatgtcactgcaccaacagttgataacatcacaggcaactctggttcgggttatgaaattacaggaacagcagaccctaacacaacaatcgaagttcgtgatccatctggggcagtcattggtacaggtacctctgatgcgaatggtgattttactgtaacgctaccaacgggaacgaccaatcctggggatacgttaacagtgattggaaaggataacgcgggaaatgaaagtcaaccgactgaagtccttgttcctgctgatgccacggttacagcaccaactgtaacaggagtaacaggtaattcagttgctggttatcaggtgacaggcaccgctgatccgaatgctaccatcgaaattcgtgatgcagatgggaacgtgattgcaacagggactgccgatgggactggttcctttgctgtgaaccttccagctgggacggcaaatgcgaatgaaacattgacagcgttagccaaagatcctgctggcaatacaagtacaccgacaaccttccaaacaccagcagatgaagtagtggcaccgccaagtgtcgacaaagttactgggaatacaacacaaggatatcaagtgacaggtaccgctgaacttggcaccaccattgaagttcgtgcaacagacggaacagttttaggcaccgcaacaactggaccgactggccaatatactgtgacgttagcttcaggaaaagcaacagctaaacaaacagtgaatgtagttgctaaaaatgatactggacttgagagtcaaccaactacagctatgacacccgctgatgttaccacaccaacaattggtgacattactggagattcaacaactggttatgaaatcactgggacggcggaccctaataccaccattgaagtacggaacccagatggaacaattattggtacaacgacaacggatgatcaaggaaactttactgtggaccttccagcgggagccgctaatcctggtgatacattaacagttgttggaaaagacggtgacggcaatgaaagtcaaccaacggaagtgacggtccctgaagatgcaaccgtagcagcaccaactgtgacgactgttacaggaacaactgccactgggtatcaagtaaccggcacggcagagccaaatgtcaccattgagattcacaatgaagcaggtttagttattgctacgggaacgactgatggtgctggcgcatttacaatcactcttccgacgggcacagcaacagctaacgaagccttaactgccattgcgaaagatgctgctgggaaagaaagtaatccgactgctttcaaaacacctgctgatccagatgcaccagtcgcgacacctactgttgacaaaatcactggtagcacgacaaacggctatcaagtagtaggagcagcagaagttggtacaacagttgaggtgcgtgacgccgatggcacagtccttggcatggcaactactggaactgatggcaaatacacagtgactttagagccagggaaggcctcagctaacgaaacaataactgtcgtagcgaaaaatgcaacaggaaaagaaagtcagccagctacagcaactacaccagtcgacttagccacaccaaccattgattctattaccggaaattctagtaaaggttacgaaatcactggaacggcggagccaaaaaccactattgatgtccgtgacgcagacggaaccatcattgctgctacaactgctaacgaaaccggccaatatacggtgactctaccagctggcgtagtgacaccaggagaaacgattacgattattagcaaagatggcgcaggtaatgaaagtcaaccagctacagccgttattccagcggatgttgttttagcggcgccaactattacgaaggttgaaggaaacaaagccaatggctatacagtcactggaactgctgatccaaatgtcacggttcaattttacaatagcagtgaacaattattggcaagtggcaatacaactactggaggtaccttctccgttcatattgcagcagggttagcaacagaaaaagaaacgttaaccgcactaaccacagatacacaaggaaatgtgagtcctaaaaccacatttatgacgccagccgatattacgggagaaccagagattaaaattgcggcaccaactgtttcttcagttttaggaacgtctaaagccggctacctcatcaaaggaacagctgaaccaaaccgaatcattcaaattagtaaccgactattaagaagtgtgattgctgtaggtgccaccgatgctgaaggcaacttcgctatccaattaacagcgggacaagcgactgctcaacaaagtttacttgcgacagctaccgatggcgcaggacattacagtacggctacaaccttcatgacgccagccgacccaacgaatcctggaggaggcaatggtaacactggcggaaataacggcaatacaggcggcaatacaggaaacaatggcgcaactggcgggaataatgggaatggttcaaacacaggttcaaatccaaatggaggttctggtttaggcacaacaggttctggcttaggttcactaggcaatggcctcggtacaaatggtagtggctaccaccctaaactaagtaccatcagttatggcactggaaatcacgggaaaacaggctacttacctagcacaggtgaaaaagagtcttcagccgtgacaacaagtttgtttggcgcctttgtcgcactccttgcgagcatgggaatcatcaaacgcaaacgtaaaaactag

SEQ ID NO: 258 - protein, 1638 aa
MKKKIVEDFNRKSQHKKWTKRKMLNLAISSGLLFTSLAIPVSIAVTSGTISASAAVLDIELLSNVTSNNDSGTSTSNRWTAANQNQPVNFTVSGGALADASAVFSGQKQAVLVVPPELRGNVAAAGSAAINTNVTIDLSKVTFLTAVLNAANDLTNVITQITSGALGNLTGVDIDLTEVNRQLELVNNIENLGAASFTAPETLAADGSYISAPISDGLGLVLAQNVSNILQDLNAAVQALEAKGTSIPSNLVAAAINAALLPVKGTVNVAVSGALPLLAVGGSGVNELVDASLLGTTTVTLPTTVSTPQNLSNNLDARFVGTVVQTDLLDVNLLATADGVSNIYFAAGTTSEVTAPTITGVTGNSTAGYEVKGTADANATVEIRNAGGTVIGTGTADGTGAFTVTVPAGEAGANETLTAVAKNASGTEXTPTTFQTPADEATVTAPTITGVTGNSTAGYEVKGTADANATVEIRNAGGTVIGTGTADGTGAFTVTVPAGEAGANETLTAVAKNASGTESTPTTFQTPADEATVTAPTITGVTGNSTAGYEVKGTADANATVEIRNAGGAVIGTGTADGTGAFTVTIPAGEAGANETLTAVAKNASGTESTPTTFQTPADPNTPVATPIVETVTGSTTKGYEVKGTAEVGTTIEVRDAAGTVLGTATTGTDGKYTVTLDSGTATANQTLSVVAKNASGTESQPATATTPADVTAPTVDNITGNSGSGYEITGTADPNTTIEVRDPSGAVIGTGTSDANGDFTVTLPTGTTNPGDTLTVIGKDNAGNESQPTEVLVPADATVTAPTVTGVTGNSVAGYQVTGTADPNATIEIRDADGNVIATGTADGTGSFAVNLPAGTANANETLTALAKDPAGNTSTPTTFQTPADEVVAPPSVDKVTGNTTQGYQVTGTAELGTTIEVRATDGTVLGTATTGPTGQYTVTLASGKATAKQTVNVVAKNDTGLESQPTTAMTPADVTTPTIGDITGDSTTGYEITGTADPNTTIEVRNPDGTIIGTTTTDDQGNFTVDLPAGAANPGDTLTVVGKDGDGNESQPTEVTVPEDATVAAPTVTTVTGTTATGYQVTGTAEPNVTIEIHNEAGLVIATGTTDGAGAFTITLPTGTATANEALTAIAKDAAGKESNPTAFKTPADPDAPVATPTVDKITGSTTNGYQVVGAAEVGTTVEVRDADGTVLGMATTGTDGKYTVTLEPGKASANETITVVAKNATGKESQPATATTPVDLATPTIDSITGNSSKGYEITGTAEPKTTIDVRDADGTIIAATTANETGQYTVTLPAGVVTPGETITIISKDGAGNESQPATAVIPADVVLAAPTITKVEGNKANGYTVTGTADPNVTVQFYNSSEQLLASGNTTTGGTFSVHIAAGLATEKETLTALTTDTQGNVSPKTTFMTPADITGEPEIKIAAPTVSSVLGTSKAGYLIKGTAEPNRIIQISNRLLRSVIAVGATDAEGNFAIQLTAGQATAQQSLLATATDGAGHYSTATTFMTPADPTNPGGGNGNTGGNNGNTGGNTGNNGATGGNNGNGSNTGSNPNGGSGLGTTGSGLGSLGNGLGTNGSGYHPKLSTISYGTGNHGKTGYLPSTGEKESSAVTTSLFGAFVALLASMGIIKRKRKN

SEQ ID NO: 259 - DNA, 1713 bp; double-stranded, linear
ctctggcacaatcagtgcatcagcagcggtcttggatatcgaactattatcaaatgttacgtcaaataatgacagtggcacttcaacgagtaatcgttggacagccgcaaaccaaaatcaaccagttaatttcacggtttctggtggcgctttagcagatgcttccgctgtgtttagtggacaaaaacaagcggtgttagtggttcctcctgagttaagaggaaatgtagctgcagcaggcagcgcagcaatcaataccaatgtcacgattgatctttcaaaagttacttttttgactgccgttttgaatgcagccaatgatttaaccaatgtgattactcaaattaccagtggggcgttagggaatttaactggtgttgatattgatttgacggaagtgaatcgtcaattggaattagttaataacattgaaaacttaggtgctgcttcatttacagctccggaaacgttagcagctgacggctcatacattagtgcaccgattagtgatggtttagggttagttttagcccaaaatgtttcaaacatcttacaagatttgaatgcggcagttcaagctttggaggcaaaaggtaccagtatcccaagtaatcttgtcgccgcagctataaatgcagccttgcttcctgtcaaaggcacggtaaacgtggctgtttcaggtgctttgcctttattagcggttggtggttcaggcgtaaatgagttagtggatgcttctttactaggcacaaccacggttactttaccaactaccgtttcaacacctcaaaatttatccaataatttagatgctcgttttgtaggaacagtcgttcaaacagatcttttagacgttaatttattagcaacagcagacggtgtatccaacatttattttgctgcaggcactactagtgaagtaaccgcaccaacaatcacaggagtaacaggtaattcaacagcaggttacgaagttaaaggaactgccgatgccaatgccacggttgaaatccgaaatgcaggaggcaccgtaataggcacaggtaccgctgatgggacaggagcgtttacagttaccgttcccgcaggtgaagcaggcgccaatgaaacgttaaccgccgtagcgaaaaacgccagcggnacagaaagnacgccaacaacgttccaaacnccagcggatgaagcaaccgtaaccgcaccaacaatcacaggagtgacaggtaattcaacggcaggttacgaagttaaaggaactgccgatgccaatgccacggttgaaatccgaaatgcaggaggcaccgtaataggcacaggtaccgctgatgggacaggagcgtttacagttaccgttcccgcaggtgaagcaggtgccaatgaaacgttaaccgccgtagcgaaaaacgccagcggcacagaaagtacgccaacaacgttccaaacaccagcggatgaagcaaccgtaaccgcaccaacaatcacaggagtgacaggtaattcaacagcaggttacgaagttaaaggaactgccgatgccaatgccacggttgagatccgaaatgcaggaggtgccgtgataggtacaggtactgctgatgggacaggggcatttacagttaccattcccgcaggtgaagcaggtgcgaatgaaacgttaaccgccgtagcgaaaaacgccagcggtacagaaagtacgccaacaacgttccaaacgcc

SEQ ID NO: 260 - protein, 392 aa
TSGTISASAAVLDIELLSNVTSNNDSGTSTSNRWTAANQNQPVNFTVSGGALADASAVFSGQKQAVLVVPPELRGNVAAAGSAAINTNVTIDLSKVTFLTAVLNAANDLTNVITQITSGALGNLTGVDIDLTEVNRQLELVNNIENLGAASFTAPETLAADGSYISAPISDGLGLVLAQNVSNILQDLNAAVQALEAKGTSIPSNLVAAAINAALLPVKGTVNVAVSGALPLLAVGGSGVNELVDASLLGTTTVTLPTTVSTPQNLSNNLDARFVGTVVQTDLLDVNLLATADGVSNIYFAAGTTSEVTAPTITGVTGNSTAGYEVKGTADANATVEIRNAGGTVIGTGTADGTGAFTVTVPAGEAGANETLTAVAKNASGTEXTPTTFQTP

SEQ ID NO: 261 - DNA, 4977 bp; double-stranded, linear; identical to SEQ ID NO: 257

SEQ ID NO: 262 - protein, 1638 aa; identical to SEQ ID NO: 258

SEQ ID NO: 263 - DNA, 1463 bp; double-stranded, linear
aggtgaagcaggtgcgaatgaaacgttaaccgccgtagcgaaaaacgccagcggtacagaaagtacgccaacaacgttccaaacgccagcggatcctaatacgcccgtggcgacgccaattgttgagactgtaacaggtagtacaacaaaaggctatgaggtcaaagggactgctgaagttggcaccaccattgaggttcgcgatgcagctggcacggtccttggtactgcaacaactggaactgacggaaaatatacagtgactttagattcaggaacagcaacagcaaatcaaacgctgagcgttgtagcgaaaaacgctagtggcacggaaagtcaaccagcaacggcgacaacaccagctgatgtcactgcaccaacagttgataacatcacaggcaactctggttcgggttatgaaattacaggaacagcagaccctaacacaacaatcgaagttcgtgatccatctggggcagtcattggtacaggtacctctgatgcgaatggtgattttactgtaacgctaccaacgggaacgaccaatcctggggatacgttaacagtgattggaaaggataacgcgggaaatgaaagtcaaccgactgaagtccttgttcctgctgatgccacggttacagcaccaactgtaacaggagtaacaggtaattcagttgctggttatcaggtgacaggcaccgctgatccgaatgctaccatcgaaattcgtgatgcagatgggaacgtgattgcaacagggactgccgatgggactggttcctttgctgtgaaccttccagctgggacggcaaatgcgaatgaaacattgacagcgttagccaaagatcctgctggcaatacaagtacaccgacaaccttccaaacaccagcagatgaagtagtggcaccgccaagtgtcgacaaagttactgggaatacaacacaaggatatcaagtgacaggtaccgctgaacttggcaccaccattgaagttcgtgcaacagacggaacagttttaggcaccgcaacaactggaccgactggccaatatactgtgacgttagcttcaggaaaagcaacagctaaacaaacagtgaatgtagttgctaaaaatgatactggacttgagagtcaaccaactacagctatgacacccgctgatgttaccacaccaacaattggtgacattactggagattcaacaactggttatgaaatcactgggacggcggaccctaataccaccattgaagtacggaacccagatggaacaattattggtacaacgacaacggatgatcaaggaaactttactgtggaccttccagcgggagccgctaatcctggtgatacattaacagttgttggaaaagacggtgacggcaatgaaagtcaaccaacggaagtgacggtccctgaagatgcaaccgtagcagcaccaactgtgacgactgttacaggaa

SEQ ID NO: 264 - protein, 669 aa
AGEAGANETLTAVAKNASGTEXTPTTFQTPADEATVTAPTITGVTGNSTAGYEVKGTADANATVEIRNAGGTVIGTGTADGTGAFTVTVPAGEAGANETLTAVAKNASGTESTPTTFQTPADEATVTAPTITGVTGNSTAGYEVKGTADANATVEIRNAGGAVIGTGTADGTGAFTVTIPAGEAGANETLTAVAKNASGTESTPTTFQTPADPNTPVATPIVETVTGSTTKGYEVKGTAEVGTTIEVRDAAGTVLGTATTGTDGKYTVTLDSGTATANQTLSVVAKNASGTESQPATATTPADVTAPTVDNITGNSGSGYEITGTADPNTTIEVRDPSGAVIGTGTSDANGDFTVTLPTGTTNPGDTLTVIGKDNAGNESQPTEVLVPADATVTAPTVTGVTGNSVAGYQVTGTADPNATIEIRDADGNVIATGTADGTGSFAVNLPAGTANANETLTALAKDPAGNTSTPTTFQTPADEVVAPPSVDKVTGNTTQGYQVTGTAELGTTIEVRATDGTVLGTATTGPTGQYTVTLASGKATAKQTVNVVAKNDTGLESQPTTAMTPADVTTPTIGDITGDSTTGYEITGTADPNTTIEVRNPDGTIIGTTTTDDQGNFTVDLPAGAANPGDTLTVVGKDGDGNESQPTEVTVPEDATVAAPTVTTVTGT

SEQ ID NO: 265 - DNA, 4977 bp; double-stranded, linear; identical to SEQ ID NO: 257

SEQ ID NO: 266 - protein, 1638 aa; identical to SEQ ID NO: 258

SEQ ID NO: 267 - DNA, 1670 bp; double-stranded, linear
cggtgacggcaatgaaagtcaaccaacggaagtgacggtccctgaagatgcaaccgtagcagcaccaactgtgacgactgttacaggaacaactgccactgggtatcaagtaaccggcacggcagagccaaatgtcaccattgagattcacaatgaagcaggtttagttattgctacgggaacgactgatggtgctggcgcatttacaatcactcttccgacgggcacagcaacagctaacgaagccttaactgccattgcgaaagatgctgctgggaaagaaagtaatccgactgctttcaaaacacctgctgatccagatgcaccagtcgcgacacctactgttgacaaaatcactggtagcacgacaaacggctatcaagtagtaggagcagcagaagttggtacaacagttgaggtgcgtgacgccgatggcacagtccttggcatggcaactactggaactgatggcaaatacacagtgactttagagccagggaaggcctcagctaacgaaacaataactgtcgtagcgaaaaatgcaacaggaaaagaaagtcagccagctacagcaactacaccagtcgacttagccacaccaaccattgattctattaccggaaattctagtaaaggttacgaaatcactggaacggcggagccaaaaaccactattgatgtccgtgacgcagacggaaccatcattgctgctacaactgctaacgaaaccggccaatatacggtgactctaccagctggcgtagtgacaccaggagaaacgattacgattattagcaaagatggcgcaggtaatgaaagtcaaccagctacagccgttattccagcggatgttgttttagcggcgccaactattacgaaggttgaaggaaacaaagccaatggctatacagtcactggaactgctgatccaaatgtcacggttcaattttacaatagcagtgaacaattattggcaagtggcaatacaactactggaggtaccttctccgttcatattgcagcagggttagcaacagaaaaagaaacgttaaccgcactaaccacagatacacaaggaaatgtgagtcctaaaaccacatttatgacgccagccgatattacgggagaaccagagattaaaattgcggcaccaactgtttcttcagttttaggaacgtctaaagccggctacctcatcaaaggaacagctgaaccaaaccgaatcattcaaattagtaaccgactattaagaagtgtgattgctgtaggtgccaccgatgctgaaggcaacttcgctatccaattaacagcgggacaagcgactgctcaacaaagtttacttgcgacagctaccgatggcgcaggacattacagtacggctacaaccttcatgacgccagccgacccaacgaatcctggaggaggcaatggtaacactggcggaaataacggcaatacaggcggcaatacaggaaacaatggcgcaactggcgggaataatgggaatggttcaaacacaggttcaaatccaaatggaggttctggtttaggcacaacaggttctggcttaggttcactaggcaatggcctcggtacaaatggtagtggctaccaccctaaactaagtaccatcagttatggcactggaaatcacgggaaaacaggctact

SEQ ID NO: 268 - protein, 558 aa
DGDGNESQPTEVTVPEDATVAAPTVTTVTGTTATGYQVTGTAEPNVTIEIHNEAGLVIATGTTDGAGAFTITLPTGTATANEALTAIAKDAAGKESNPTAFKTPADPDAPVATPTVDKITGSTTNGYQVVGAAEVGTTVEVRDADGTVLGMATTGTDGKYTVTLEPGKASANETITVVAKNATGKESQPATATTPVDLATPTIDSITGNSSKGYEITGTAEPKTTIDVRDADGTIIAATTANETGQYTVTLPAGVVTPGETITIISKDGAGNESQPATAVIPADVVLAAPTITKVEGNKANGYTVTGTADPNVTVQFYNSSEQLLASGNTTTGGTFSVHIAAGLATEKETLTALTTDTQGNVSPKTTFMTPADITGEPEIKIAAPTVSSVLGTSKAGYLIKGTAEPNRIIQISNRLLRSVIAVGATDAEGNFAIQLTAGQATAQQSLLATATDGAGHYSTATTFMTPADPTNPGGGNGNTGGNNGNTGGNTGNNGATGGNNGNGSNTGSNPNGGSGLGTTGSGLGSLGNGLGTNGSGYHPKLSTISYGTGNHGKTGYL

SEQ ID NO: 269 - DNA, 771 bp; double-stranded, linear
taagtagaagtggtcgggacaaacgtagaactttcgctgattgccgaagaaattacttctgtcccgccatttatctgcaggtttaagccgtggaagggaagttattttgactttcctttcatggcttttttaagaaaggagcatgctatgtttaaaaaattaatgattcaacttgctttagtgattggtttaagtttaacgattccgatgacggcttncgcttacaccatcgaagcggatccaatcaactttacttattttcccggctctgcaagcaatgaattaattgttttacatgaatctggaaacgagcggaacctaggaccacacagtttagacaatgaagtggcctatatgaaacgaaattggtcaaatgcttatgtctcatattttgtcggatctggtggacgagtgaaacaattagctcctgctggccaaattcaatatggcgcaggttctttagctaatcaaaaagcctatgcgcaaatcgaattggctcgaacgaataatgcggcgacatttaaaaaagattatgctgcctatgttaatttggcccgtgatttggctcagaacattggtgctgatttttctctggacgatggaacaggttatggcatagtcactcatgattggattacaaaaaattggtggggagatcatacagatccttatggttatttagcgcgtgggggattagtaaagcgcattggcacnagatttacaacgggcgtttcngnaacaggtgagactggtcattattcagccaggtaa

SEQ ID NO: 270 - protein, 207 aa
MFKKLMIQLALVIGLSLTIPMTAXAYTIEADPINFTYFPGSASNELIVLHESGNERNLGPHSLDNEVAYMKRNWSNAYVSYFVGSGGRVKQLAPAGQIQYGAGSLANQKAYAQIELARTNNAATFKKDYAAYVNLARDLAQNIGADFSLDDGTGYGIVTHDWITKNWWGDHTDPYGYLARGGLVKRIGTRFTTGVSXTGETGHYSAR

SEQ ID NO: 271 - DNA, 620 bp; double-stranded, linear
gtttaaaaaattaatgattcaacttgctttagtgattggtttaagtttaacgattccgatgacggcttncgcttacaccatcgaagcggatccaatcaactttacttattttcccggctctgcaagcaatgaattaattgttttacatgaatctggaaacgagcggaacctaggaccacacagtttagacaatgaagtggcctatatgaaacgaaattggtcaaatgcttatgtctcatattttgtcggatctggtggacgagtgaaacaattagctcctgctggccaaattcaatatggcgcaggttctttagctaatcaaaaagcctatgcgcaaatcgaattggctcgaacgaataatgcggcgacatttaaaaaagattatgctgcctatgttaatttggcccgtgatttggctcagaacattggtgctgatttttctctggacgatggaacaggttatggcatagtcactcatgattggattacaaaaaattggtggggagatcatacagatccttatggttatttagcgcgtgggggattagtaaagcgcattggcacnagatttacaacgggcgtttcngnaacaggtgagactggtcattattcagccaggt

SEQ ID NO: 272 - protein, 206 aa
FKKLMIQLALVIGLSLTIPMTAXAYTIEADPINFTYFPGSASNELIVLHESGNERNLGPHSLDNEVAYMKRNWSNAYVSYFVGSGGRVKQLAPAGQIQYGAGSLANQKAYAQIELARTNNAATFKKDYAAYVNLARDLAQNIGADFSLDDGTGYGIVTHDWITKNWWGDHTDPYGYLARGGLVKRIGTRFTTGVSXTGETGHYSAR

SEQ ID NO: 273 - DNA, 1299 bp; double-stranded, linear
taatcaatgaaaaacgcacgttggttaagtatttgcgtcatgctactcgctcttttcgggttttcacagcaagcattagcagaggcatcgcaagcaagcgttcaagttacgttgcacaaattattgttccctgatggtcaattaccagaacagcagcaaaacacaggggaagagggaacgctgcttcaaaattatcggggcttaaatgacgtcacttatcaagtctatgatgtgacggatccgttttatcagcttcgttctgaaggaaaaacggtccaagaggcacagcgtcaattagcagaaaccggtgcaacaaatagaaaaccgatcgcagaagataaaacacagacaataaatggagaagatggagtggtttctttttcattagctagcaaagattcgcagcaacgagataaagcctatttatttgttgaagcggaagcaccagaagtggtaaaggaaaaagctagcaacctagtagtgattttgcctgttcaagatccacaagggcaatcgttaacgcatattcatttatatccaaaaaatgaagaaaatgcctatgacttaccaccacttgaaaaaacggtactcgataagcaacaaggctttaatcaaggagagcacattaactatcagttaacgactcagattccagcgaatattttaggatatcaggaattccgtttgtcagataaggcggatacaacgttgacacttttaccagaatcaattgaggtaaaagtggctggaaaaacagttactacaggttacacactgacgacgcaaaagcatggatttacgcttgatttttcaattaaagacttacaaaactttgcaaatcaaacaatgactgtgtcgtatcaaatgcgtttagaaaagaccgctgaacctgacactgcgattaacaacgaaggacaattagtcacggacaaacataccttgactaaaagagccacagttcgtacaggcggcaagtcttttgtcaaagttgatagtgaaaatgcgaaaatcaccttgccagaggctgtttttatcgtcaaaaatcaagcgggggaatacctcaatgaaacagcaaacgggtatcgttggcaaaaagaaaaagcattagctaaaaaattcacgtctaatcaagccggtgaattttcagttaaaggnnttaaaagatggccagtacttcttggaagaaatctctgcaccaaaaggttatcttctgaatcaaacagaaattccttttacggtgggaaaaaattcttatgcaacgaacggacaacgaacagcaccgttacatgtaatcaataa

SEQ ID NO: 274 - protein, 430 aa
MKNARWLSICVMLLALFGFSQQALAEASQASVQVTLHKLLFPDGQLPEQQQNTGEEGTLLQNYRGLNDVTYQVYDVTDPFYQLRSEGKTVQEAQRQLAETGATNRKPIAEDKTQTINGEDGVVSFSLASKDSQQRDKAYLFVEAEAPEVVKEKASNLVVILPVQDPQGQSLTHIHLYPKNEENAYDLPPLEKTVLDKQQGFNQGEHINYQLTTQIPANILGYQEFRLSDKADTTLTLLPESIEVKVAGKTVTTGYTLTTQKHGFTLDFSIKDLQNFANQTMTVSYQMRLEKTAEPDTAINNEGQLVTDKHTLTKRATVRTGGKSFVKVDSENAKITLPEAVFIVKNQAGEYLNETANGYRWQKEKALAKKFTSNQAGEFSVKGXKRWPVLLGRNLCTKRLSSESNRNSFYGGKKFLCNERTTNSTVTCNQ

SEQ ID NO: 275 - DNA, 1151 bp; double-stranded, linear
attaccagaacagcagcaaaacacaggggaagagggaacgctgcttcaaaattatcggggcttaaatgacgtcacttatcaagtctatgatgtgacggatccgttttatcagcttcgttctgaaggaaaaacggtccaagaggcacagcgtcaattagcagaaaccggtgcaacaaatagaaaaccgatcgcagaagataaaacacagacaataaatggagaagatggagtggtttctttttcattagctagcaaagattcgcagcaacgagataaagcctatttatttgttgaagcggaagcaccagaagtggtaaaggaaaaagctagcaacctagtagtgattttgcctgttcaagatccacaagggcaatcgttaacgcatattcatttatatccaaaaaatgaagaaaatgcctatgacttaccaccacttgaaaaaacggtactcgataagcaacaaggctttaatcaaggagagcacattaactatcagttaacgactcagattccagcgaatattttaggatatcaggaattccgtttgtcagataaggcggatacaacgttgacacttttaccagaatcaattgaggtaaaagtggctggaaaaacagttactacaggttacacactgacgacgcaaaagcatggatttacgcttgatttttcaattaaagacttacaaaactttgcaaatcaaacaatgactgtgtcgtatcaaatgcgtttagaaaagaccgctgaacctgacactgcgattaacaacgaaggacaattagtcacggacaaacataccttgactaaaagagccacagttcgtacaggcggcaagtcttttgtcaaagttgatagtgaaaatgcgaaaatcaccttgccagaggctgtttttatcgtcaaaaatcaagcgggggaatacctcaatgaaacagcaaacgggtatcgttggcaaaaagaaaaagcattagctaaaaaattcacgtctaatcaagccggtgaattttcagttaaaggnnttaaaagatggccagtacttcttggaagaaatctctgcaccaaaaggttatcttctgaatcaaacagaaattccttttacggtgggaaaaaattcttatgcaacgaacggacaacgaacagcaccgttacatgta

SEQ ID NO: 276 - protein, 384 aa
QLPEQQQNTGEEGTLLQNYRGLNDVTYQVYDVTDPFYQLRSEGKTVQEAQRQLAETGATNRKPIAEDKTQTINGEDGVVSFSLASKDSQQRDKAYLFVEAEAPEVVKEKASNLVVILPVQDPQGQSLTHIHLYPKNEENAYDLPPLEKTVLDKQQGFNQGEHINYQLTTQIPANILGYQEFRLSDKADTTLTLLPESIEVKVAGKTVTTGYTLTTQKHGFTLDFSIKDLQNFANQTMTVSYQMRLEKTAEPDTAINNEGQLVTDKHTLTKRATVRTGGKSFVKVDSENAKITLPEAVFIVKNQAGEYLNETANGYRWQKEKALAKKFTSNQAGEFSVKGXKRWPVLLGRNLCTKRLSSESNRNSFYGGKKFLCNERTTNSTVTC

SEQ ID NO: 277 - DNA, 684 bp; double-stranded, linear
taaatgaacaaattaaatacaaaattactgattggctatattcttttaggagccttaatcattgctgtcgctagagaatatggcttcttcgcttttgtgattctggtaggctttttagtattcgttctctatcgaaaaaagaaaaatgccgccgacaaaagcgatcaaatgccttacttaacgaaagataaagaagcccattatcgtgagttggggttatctccacaagaaattgattttttcagaagtacaatgagcacagccaaaaaacaaatcatacaattgcaagaaaacatgaatcgttcaactaaattacgggcgattgacttacgtaatgatactacgaaggtttctaaagctctgtttaaagagttagtgaaagaacctaaaaagttacacttagccaatcactttctctatacacatttaccaaatatcgttgacttaacaagtaaacatttagaaatcgaacaacacgaagtaaaaaacaaacaaacgtatgaaaaattagaagaaagcgcacaaatcattgaccaattgtcaaaattagttaaaaatgattatgaggaaatcgtttccgatgacttagacgatttagatgtcgaaatgtcgatcgctaaaagcagcttgtcgcaaaaagctgcaactgaggaatcacctcaagtaaacgaagaccagcaataa

SEQ ID NO: 278 - protein, 226 aa
MNKLNTKLLIGYILLGALIIAVAREYGFFAFVILVGFLVFVLYRKKKNAADKSDQMPYLTKDKEAHYRELGLSPQEIDFFRSTMSTAKKQIIQLQENMNRSTKLRAIDLRNDTTKVSKALFKELVKEPKKLHLANHFLYTHLPNIVDLTSKHLEIEQHEVKNKQTYEKLEESAQIIDQLSKLVKNDYEEIVSDDLDDLDVEMSIAKSSLSQKAATEESPQVNEDQQ

SEQ ID NO: 279 - DNA, 554 bp; double-stranded, linear
ctatcgaaaaaagaaaaatgccgccgacaaaagcgatcaaatgccttacttaacgaaagataaagaagcccattatcgtgagttggggttatctccacaagaaattgattttttcagaagtacaatgagcacagccaaaaaacaaatcatacaattgcaagaaaacatgaatcgttcaactaaattacgggcgattgacttacgtaatgatactacgaaggtttctaaagctctgtttaaagagttagtgaaagaacctaaaaagttacacttagccaatcactttctctatacacatttaccaaatatcgttgacttaacaagtaaacatttagaaatcgaacaacacgaagtaaaaaacaaacaaacgtatgaaaaattagaagaaagcgcacaaatcattgaccaattgtcaaaattagttaaaaatgattatgaggaaatcgtttccgatgacttagacgatttagatgtcgaaatgtcgatcgctaaaagcagcttgtcgcaaaaagctgcaactgaggaatcacctcaagtaaacgaagaccagcaat

SEQ ID NO: 280 - protein, 184 aa
YRKKKNAADKSDQMPYLTKDKEAHYRELGLSPQEIDFFRSTMSTAKKQIIQLQENMNRSTKLRAIDLRNDTTKVSKALFKELVKEPKKLHLANHFLYTHLPNIVDLTSKHLEIEQHEVKNKQTYEKLEESAQIIDQLSKLVKNDYEEIVSDDLDDLDVEMSIAKSSLSQKAATEESPQVNEDQQ

SEQ ID NO: 281 - DNA, 795 bp; double-stranded, linear
taaaggagttctcaaaaaatgaagctaaaaaaaataattcctgcttttccccttctttcaaccgttgcagttggcttgtggttaacgcctactcaagcttctgcagatgctgcggatacgatggtagatatctctggcaaaaaagtgttggttggatattggcataactgggcctcaaaaggacgcgatggttacaaacaaggaacatcagcatcactaaacctttcagaagtaaatcaagcctacaatgtcgtaccggtttccttcatgaaaagcgatggcacgacacggattcctacgttcaagccttataaccaaacggacactgccttccgacaagaagtcgcacaattaaatagtcaaggtcgcgcagttttattggcacttggtggagcagatgcacatattcaattagtcaaaggcgatgaacaagcctttgcgaatgaaatcattcgtcaagtggaaacatacggctttgatggtttagacatcgacttagagcaattggcgattactgctggcgacaaccaaaccgtcatccctgctacgttgaaaatagtcaaagaccattatcgagcacaaggaaaaaatttcatcattacgatggcaccagaattcccttatttaaaacctggtgccgcttatgaaacatacattacttccctaaatggttattatgattacattgccccacaattatataaccaaggcggcgacggtgtctgggttgatgaagttatgacttgggttgctcaaagcaacgatgctctaaaatacgagttcctctatnatatt

SEQ ID NO: 282 - protein, 259 aa
MKLKKIIPAFPLLSTVAVGLWLTPTQASADAADTMVDISGKKVLVGYWHNWASKGRDGYKQGTSASLNLSEVNQAYNVVPVSFMKSDGTTRIPTFKPYNQTDTAFRQEVAQLNSQGRAVLLALGGADAHIQLVKGDEQAFANEIIRQVETYGFDGLDIDLEQLAITAGDNQTVIPATLKIVKDHYRAQGKNFIITMAPEFPYLKPGAAYETYITSLNGYYDYIAPQLYNQGGDGVWVDEVMTWVAQSNDALKYEFLYXI

SEQ ID NO: 283 - DNA, 680 bp; double-stranded, linear
tgctgcggatacgatggtagatatctctggcaaaaaagtgttggttggatattggcataactgggcctcaaaaggacgcgatggttacaaacaaggaacatcagcatcactaaacctttcagaagtaaatcaagcctacaatgtcgtaccggtttccttcatgaaaagcgatggcacgacacggattcctacgttcaagccttataaccaaacggacactgccttccgacaagaagtcgcacaattaaatagtcaaggtcgcgcagttttattggcacttggtggagcagatgcacatattcaattagtcaaaggcgatgaacaagcctttgcgaatgaaatcattcgtcaagtggaaacatacggctttgatggtttagacatcgacttagagcaattggcgattactgctggcgacaaccaaaccgtcatccctgctacgttgaaaatagtcaaagaccattatcgagcacaaggaaaaaatttcatcattacgatggcaccagaattcccttatttaaaacctggtgccgcttatgaaacatacattacttccctaaatggttattatgattacattgccccacaattatataaccaaggcggcgacggtgtctgggttgatgaagttatgacttgggttgctcaaagcaacgatgctctaaaatacgagttcctct

SEQ ID NO: 284 - protein, 227 aa
AADTMVDISGKKVLVGYWHNWASKGRDGYKQGTSASLNLSEVNQAYNVVPVSFMKSDGTTRIPTFKPYNQTDTAFRQEVAQLNSQGRAVLLALGGADAHIQLVKGDEQAFANEIIRQVETYGFDGLDIDLEQLAITAGDNQTVIPATLKIVKDHYRAQGKNFIITMAPEFPYLKPGAAYETYITSLNGYYDYIAPQLYNQGGDGVWVDEVMTWVAQSNDALKYEFLY

SEQ ID NO: 285 - DNA, 963 bp; double-stranded, linear
taacctataagaaaaaaatcacaacctgtgataaattattggaggnaaaatatgtcaaaagggaagaaaatttttgccattatcnttggaattatcttggntctatttcttgcagttgttggaatgggagcaaaactttattgggatgtttctaaatcaatggataaaacctatgaaacagtagaacgatctaaaaaaagtcaggtcaatttaaacaataaggagcctttttctgttttattattagggattgatacaggcgatgatgggcgtgtcgagcaaggtcgttcggatacaacaattgttgcaacagttaatcctcgtgacaagcaaacaaccttagtcagtcttgctcgcgatacctatgttgatattccaggtcaaggaaaacaagataaattgaatcacgcctatgcttttggtggcgcatctttagcaatggacacagttgaaaactatttaaacatacctattaatcattatgtttcaattaatatggctggtttaaaagaattagtcaacgcggttggcggaatcgaagtgaacaataatctgactttttctcaagacggatatgattttacgattggtaaaatttcattggatggtgaacaagcactctcctattcaagaatgcgttacgaagaccctaatggtgactacggccgccaagaacgtcaaagaaaagtgattgaaggcatcgtccaaaaagtcttaagtcttaacagcgtaagcaactatcaagaaattttaacagctgtttctgataatatgaagacagatttaagttttgatgacatgaaaaaaattgccttagattatcgcagtgcctttggtaaagtgaaacaagaccaacttcaaggtactggttttatgcaagatggtgtttcctatcaacgtgtggatgaacaagaattaactcgtgtccaacaagagttgaaaaatcaattgaatacaaaataa

SEQ ID NO: 286 - protein, 303 aa
MSKGKKIFAIIXGIILXLFLAVVGMGAKLYWDVSKSMDKTYETVERSKKSQVNLNNKEPFSVLLLGIDTGDDGRVEQGRSDTTIVATVNPRDKQTTLVSLARDTYVDIPGQGKQDKLNHAYAFGGASLAMDTVENYLNIPINHYVSINMAGLKELVNAVGGIEVNNNLTFSQDGYDFTIGKISLDGEQALSYSRMRYEDPNGDYGRQERQRKVIEGIVQKVLSLNSVSNYQEILTAVSDNMKTDLSFDDMKKIALDYRSAFGKVKQDQLQGTGFMQDGVSYQRVDEQELTRVQQELKNQLNTK

SEQ ID NO: 287 - DNA, 826 bp; double-stranded, linear
actttattgggatgtttctaaatcaatggataaaacctatgaaacagtagaacgatctaaaaaaagtcaggtcaatttaaacaataaggagcctttttctgttttattattagggattgatacaggcgatgatgggcgtgtcgagcaaggtcgttcggatacaacaattgttgcaacagttaatcctcgtgacaagcaaacaaccttagtcagtcttgctcgcgatacctatgttgatattccaggtcaaggaaaacaagataaattgaatcacgcctatgcttttggtggcgcatctttagcaatggacacagttgaaaactatttaaacatacctattaatcattatgtttcaattaatatggctggtttaaaagaattagtcaacgcggttggcggaatcgaagtgaacaataatctgactttttctcaagacggatatgattttacgattggtaaaatttcattggatggtgaacaagcactctcctattcaagaatgcgttacgaagaccctaatggtgactacggccgccaagaacgtcaaagaaaagtgattgaaggcatcgtccaaaaagtcttaagtcttaacagcgtaagcaactatcaagaaattttaacagctgtttctgataatatgaagacagatttaagttttgatgacatgaaaaaaattgccttagattatcgcagtgcctttggtaaagtgaaacaagaccaacttcaaggtactggttttatgcaagatggtgtttcctatcaacgtgtggatgaacaagaattaactcgtgtccaacaagagttgaaaaatcaattgaatacaaaa

SEQ ID NO: 288 - protein, 276 aa
KLYWDVSKSMDKTYETVERSKKSQVNLNNKEPFSVLLLGIDTGDDGRVEQGRSDTTIVATVNPRDKQTTLVSLARDTYVDIPGQGKQDKLNHAYAFGGASLAMDTVENYLNIPINHYVSINMAGLKELVNAVGGIEVNNNLTFSQDGYDFTIGKISLDGEQALSYSRMRYEDPNGDYGRQERQRKVIEGIVQKVLSLNSVSNYQEILTAVSDNMKTDLSFDDMKKIALDYRSAFGKVKQDQLQGTGFMQDGVSYQRVDEQELTRVQQELKNQLNTK

SEQ ID NO: 289 - DNA, 423 bp; double-stranded, linear
tagaaaataacagaggagctgaaggaaatgaaagcatcaacaaaaattggtatcggtttaagcattgctgcagttgcaagtgtctctgttgcagtcatcgcttctgaaaaaattattaagaaggtatctcatgtttccaatcgttataaagttaaaaagtttgtagacgataaatttgatggaaaccaaaaattattatcgattgtcgatgatttatccgatgatgaattagattctgttttaaatgttgtggatcgtgtgaaagatggcggttcaaaattagctgaatatggcgaaaaagttaaagacaatacagattctttaaaagaacgctttttcacatttattgaagatgcaatgaagttaaaaaagtggcctaggccatcttttttttataaaaataattcttttgtttcaacataa

SEQ ID NO: 290 - protein, 131 aa
MKASTKIGIGLSIAAVASVSVAVIASEKIIKKVSHVSNRYKVKKFVDDKFDGNQKLLSIVDDLSDDELDSVLNVVDRVKDGGSKLAEYGEKVKDNTDSLKERFFTFIEDAMKLKKWPRPSFFYKNNSFVST

SEQ ID NO: 291 - DNA, 314 bp; double-stranded, linear
catcgcttctgaaaaaattattaagaaggtatctcatgtttccaatcgttataaagttaaaaagtttgtagacgataaatttgatggaaaccaaaaattattatcgattgtcgatgatttatccgatgatgaattagattctgttttaaatgttgtggatcgtgtgaaagatggcggttcaaaattagctgaatatggcgaaaaagttaaagacaatacagattctttaaaagaacgctttttcacatttattgaagatgcaatgaagttaaaaaagtggcctaggccatcttttttttataaaaataattctt

SEQ ID NO: 292 - protein, 105 aa
VIASEKIIKKVSHVSNRYKVKKFVDDKFDGNQKLLSIVDDLSDDELDSVLNVVDRVKDGGSKLAEYGEKVKDNTDSLKERFFTFIEDAMKLKKWPRPSFFYKNNS

SEQ ID NO: 293 - DNA, 1839 bp; double-stranded, linear
taatgtaaagtgaatgatgggagagaaaaagagatgaagcatgtaacaaaattggggattacaattataacaggagttttggcattattatttgaatttattttacatcagccgaattgggcgtatggcattattttaataacaggttctgtaatggcgttaatgatgttctgggaaatgattcaaaccttacgtgaaggaaaatatggtgtcgatattttagcgattaccgctatcgttgcaaccttagctgtgggagaatactgggccagtttgatgattttaattatgttgactggtggtgattcattagaagactatgccgctggaaaagctaaccaagagctgaagtcattattggataactcgccacaaaaagctcatcgcttgaatggcgaaaatttagaagatgtttctgttgaggaaatcaatgttggcgatgaattagtagtaaaaccaggggaactagttccagttgatggcttggtaaaaaccgggacatcaacagtcgatgaatcttcattaacaggagaatcaaaaccaattgaaaaaaatcctggggatgaattaatgtcgggttccgtgaatggtgacggctctttgaaaatggttgctgaaaaaactgtagcagacagtcaatatcaaacaattgtgaacttagtgaaagaatctgcggcgcgtccagctcattttgtacgtttagcagatcgctatgcggtaccttttacactagttgcctacctaattgcaggtgttgcttggtttgtttcaaaaagtccgacacgttttgcggaagtcttagttgttgcttcgccgtgtcctttaattctatctgccccaattgctttagtggcagggatgggtcgttcaagtcgtcatggggtcgttattaaatcgggaacgatggtcgaaaaattagcttctgcaaaaacgattgcgtttgataaaacaggcacgattacgcaaggacaactttctgttgatcaagtccaaccaatcaatgctggaataactgctgctgaattagtgggattggcagcaagcgtggaacaagaatcaagtcatattttagctagatcaattgttgcttatgccagaaagcaagatgtcccattaaaaaatattacagatctagcggaagtttctggtgctggcgtgaaggcatttgtggatggtgctgagatacgggtaggtaaaaagaattttgtgacacaagagtctcaagaaactgaaaaaattgataaaacgactattcatatttcacgtaatggcacatatttaggccgaattacttttacagacactgtacgcccagaagcaaaagagactatggaaaaattacaccaattacatcttcaacgaattttaatgctgacgggggatcaagaatccgttgcagaaacgattgctgcagaagtaggaattaccgaagtacatggggaatgtttaccacaagataaattaactattctaaaagaattgcctaaagaaaatcatccagtcatcatggtaggagatggtgtaaatgatgcaccttcgcttgctgctgcagacgtaggtattgctatgggtgctcatggagctactgcggctagtgaaactgctgacgttgttattttaaaagatgacttaagtaaagtcagccaagcggtcgaaattgcccaagataccatgaaaattgccaaacaatctgtattaatcggaatttttatctgcgttttactaatgttaattgctagtaccgggatcattccggcgctaatcggggctatgctacaagaagtcgtggacactgtgtcaatcttatctgctttgcgtgctcgtcgaattggccagtaa

SEQ ID NO: 294 - protein, 601 aa
MKHVTKLGITIITGVLALLFEFILHQPNWAYGIILITGSVMALMMFWEMIQTLREGKYGVDILAITAIVATLAVGEYWASLMILIMLTGGDSLEDYAAGKANQELKSLLDNSPQKAHRLNGENLEDVSVEEINVGDELVVKPGELVPVDGLVKTGTSTVDESSLTGESKPIEKNPGDELMSGSVNGDGSLKMVAEKTVADSQYQTIVNLVKESAARPAHFVRLADRYAVPFTLVAYLIAGVAWFVSKSPTRFAEVLVVASPCPLILSAPIALVAGMGRSSRHGVVIKSGTMVEKLASAKTIAFDKTGTITQGQLSVDQVQPINAGITAAELVGLAASVEQESSHILARSIVAYARKQDVPLKNITDLAEVSGAGVKAFVDGAEIRVGKKNFVTQESQETEKIDKTTIHISRNGTYLGRITFTDTVRPEAKETMEKLHQLHLQRILMLTGDQESVAETIAAEVGITEVHGECLPQDKLTILKELPKENHPVIMVGDGVNDAPSLAAADVGIAMGAHGATAASETADVVILKDDLSKVSQAVEIAQDTMKIAKQSVLIGIFICVLLMLIASTGIIPALIGAMLQEVVDTVSILSALRARRIGQ

SEQ ID NO: 295 - DNA, 1727 bp; double-stranded, linear
tcagccgaattgggcgtatggcattattttaataacaggttctgtaatggcgttaatgatgttctgggaaatgattcaaaccttacgtgaaggaaaatatggtgtcgatattttagcgattaccgctatcgttgcaaccttagctgtgggagaatactgggccagtttgatgattttaattatgttgactggtggtgattcattagaagactatgccgctggaaaagctaaccaagagctgaagtcattattggataactcgccacaaaaagctcatcgcttgaatggcgaaaatttagaagatgtttctgttgaggaaatcaatgttggcgatgaattagtagtaaaaccaggggaactagttccagttgatggcttggtaaaaaccgggacatcaacagtcgatgaatcttcattaacaggagaatcaaaaccaattgaaaaaaatcctggggatgaattaatgtcgggttccgtgaatggtgacggctctttgaaaatggttgctgaaaaaactgtagcagacagtcaatatcaaacaattgtgaacttagtgaaagaatctgcggcgcgtccagctcattttgtacgtttagcagatcgctatgcggtaccttttacactagttgcctacctaattgcaggtgttgcttggtttgtttcaaaaagtccgacacgttttgcggaagtcttagttgttgcttcgccgtgtcctttaattctatctgccccaattgctttagtggcagggatgggtcgttcaagtcgtcatggggtcgttattaaatcgggaacgatggtcgaaaaattagcttctgcaaaaacgattgcgtttgataaaacaggcacgattacgcaaggacaactttctgttgatcaagtccaaccaatcaatgctggaataactgctgctgaattagtgggattggcagcaagcgtggaacaagaatcaagtcatattttagctagatcaattgttgcttatgccagaaagcaagatgtcccattaaaaaatattacagatctagcggaagtttctggtgctggcgtgaaggcatttgtggatggtgctgagatacgggtaggtaaaaagaattttgtgacacaagagtctcaagaaactgaaaaaattgataaaacgactattcatatttcacgtaatggcacatatttaggccgaattacttttacagacactgtacgcccagaagcaaaagagactatggaaaaattacaccaattacatcttcaacgaattttaatgctgacgggggatcaagaatccgttgcagaaacgattgctgcagaagtaggaattaccgaagtacatggggaatgtttaccacaagataaattaactattctaaaagaattgcctaaagaaaatcatccagtcatcatggtaggagatggtgtaaatgatgcaccttcgcttgctgctgcagacgtaggtattgctatgggtgctcatggagctactgcggctagtgaaactgctgacgttgttattttaaaagatgacttaagtaaagtcagccaagcggtcgaaattgcccaagataccatgaaaattgccaaacaatctgtattaatcggaatttttatctgcgttttactaatgttaattgctagtaccgggatcattccggcgctaatcggggctatgctacaagaagtcgtggacactgtgtcaatcttatctgctttgcgtgctcgtcgaattggcc

SEQ ID NO: 296 - protein, 575 aa
QPNWAYGIILITGSVMALMMFWEMIQTLREGKYGVDILAITAIVATLAVGEYWASLMILIMLTGGDSLEDYAAGKANQELKSLLDNSPQKAHRLNGENLEDVSVEEINVGDELVVKPGELVPVDGLVKTGTSTVDESSLTGESKPIEKNPGDELMSGSVNGDGSLKMVAEKTVADSQYQTIVNLVKESAARPAHFVRLADRYAVPFTLVAYLIAGVAWFVSKSPTRFAEVLVVASPCPLILSAPIALVAGMGRSSRHGVVIKSGTMVEKLASAKTIAFDKTGTITQGQLSVDQVQPINAGITAAELVGLAASVEQESSHILARSIVAYARKQDVPLKNITDLAEVSGAGVKAFVDGAEIRVGKKNFVTQESQETEKIDKTTIHISRNGTYLGRITFTDTVRPEAKETMEKLHQLHLQRILMLTGDQESVAETIAAEVGITEVHGECLPQDKLTILKELPKENHPVIMVGDGVNDAPSLAAADVGIAMGAHGATAASETADVVILKDDLSKVSQAVEIAQDTMKIAKQSVLIGIFICVLLMLIASTGIIPALIGAMLQEVVDTVSILSALRARRIG

SEQ ID NO: 297 - DNA, 951 bp; double-stranded, linear
taatttctagcatcaccgaagaaatttttagaaaaacaaagagcctgggccaatcactgtcccaggctctcatgctttatttttaaggaggaagcaatgaagtcaaaaaagaaacgtcgtatcattgatggttttatgattcttttactgattattggaataggtgcatttgcgtatccttttgttagcgatgcattaaataactatctggatcaacaaattatcgctcattatcaagcaaaagcaagccaagaaaacaccaaagaaatggctgaacttcaagaaaaaatggaaaagaaaaaccaagaattagcgaaaaaaggcagcaatcctggattagatcctttttctgaaacgcaaaaaacaacgaaaaaaccagacaaatcctattttgaaagtcatacgattggtgttttaaccattccaaaaataaatgtccgtttaccaatttttgataaaacgaatgcattgctattggaaaaaggaagctccttgttagaaggaacctcctatcctacaggtggtacgaatacacatgcggtcatttcaggccatcgtggtctccctcaagccaaattatttacagatttgccagaattaaaaaaaggcgatgaattttatatcgaagtcaatgggaagacgcttgcttatcaagtagatcaaataaaaaccgttgaaccaactgatacaaaagatttacacattgagtctggccaagatctcgtcactttattaacttgcacaccgtatatgataaacagtcatcggttattagttcgaggacatcgtatcccatatcaaccagaaaaagcagcagcggggatgaaaaaagtggcacaacaacaaaatttactattatggacattacttttaattgcctgtgcgttaattattagcggcttcattatctggtacaagcgacggaaaaagacgaccagaaaaccaaagtag

SEQ ID NO: 298 - protein, 284 aa
MKSKKKRRIIDGFMILLLIIGIGAFAYPFVSDALNNYLDQQIIAHYQAKASQENTKEMAELQEKMEKKNQELAKKGSNPGLDPFSETQKTTKKPDKSYFESHTIGVLTIPKINVRLPIFDKTNALLLEKGSSLLEGTSYPTGGTNTHAVISGHRGLPQAKLFTDLPELKKGDEFYIEVNGKTLAYQVDQIKTVEPTDTKDLHIESGQDLVTLLTCTPYMINSHRLLVRGHRIPYQPEKAAAGMKKVAQQQNLLLWTLLLIACALIISGFIIWYKRRKKTTRKPK

SEQ ID NO: 299 - DNA, 770 bp; double-stranded, linear
tccttttgttagcgatgcattaaataactatctggatcaacaaattatcgctcattatcaagcaaaagcaagccaagaaaacaccaaagaaatggctgaacttcaagaaaaaatggaaaagaaaaaccaagaattagcgaaaaaaggcagcaatcctggattagatcctttttctgaaacgcaaaaaacaacgaaaaaaccagacaaatcctattttgaaagtcatacgattggtgttttaaccattccaaaaataaatgtccgtttaccaatttttgataaaacgaatgcattgctattggaaaaaggaagctccttgttagaaggaacctcctatcctacaggtggtacgaatacacatgcggtcatttcaggccatcgtggtctccctcaagccaaattatttacagatttgccagaattaaaaaaaggcgatgaattttatatcgaagtcaatgggaagacgcttgcttatcaagtagatcaaataaaaaccgttgaaccaactgatacaaaagatttacacattgagtctggccaagatctcgtcactttattaacttgcacaccgtatatgataaacagtcatcggttattagttcgaggacatcgtatcccatatcaaccagaaaaagcagcagcggggatgaaaaaagtggcacaacaacaaaatttactattatggacattacttttaattgcctgtgcgttaattattagcggcttcattatctggtacaagcgacggaaaaagacgaccagaaaaccaa

SEQ ID NO: 300 - protein, 256 aa
PFVSDALNNYLDQQIIAHYQAKASQENTKEMAELQEKMEKKNQELAKKGSNPGLDPFSETQKTTKKPDKSYFESHTIGVLTIPKINVRLPIFDKTNALLLEKGSSLLEGTSYPTGGTNTHAVISGHRGLPQAKLFTDLPELKKGDEFYIEVNGKTLAYQVDQIKTVEPTDTKDLHIESGQDLVTLLTCTPYMINSHRLLVRGHRIPYQPEKAAAGMKKVAQQQNLLLWTLLLIACALIISGFIIWYKRRKKTTRKP

SEQ ID NO: 301 - DNA, 891 bp; double-stranded, linear
tagttacactcgtttagggctagcaacgttaggcattttcgctggactcttagcactctttttattaggaggttatttcctatgaaaaaacgacttttacctatttttttcctaatacttcttacctttggccttgccctacccgtttcggcggctgaaaattcaattgatgatggcgcacaattactgacacctgatcaaatcaaccaactaaagcaagagatacaacctttagaagaaaaaacaaaagcctctgtctttattgtaaccacaaataataatacctatggcgatgaacaagaatatgcagatcattatcttttaaataaagttggcaaggaccaaaatgcgattctttttctcattgatatggacttacggaaaatctacatctctacttctggaaacatgattgattatatgacagatgcacgaattgatgataccttagataaaatatgggataatatgagtcaaggaaattatttcgcggctgctcaaacctttgttcaggaaactcaagcatttgttaataaaggggttcctggggggcactatcgtgtggacagcgaaacaggtaaaatcactcgttataaagtcattaccccgctggaaatggtaattgcttttgctgctgcgctgatactcagtttggtcttcttaggcattaatatttctaaatatcaattaaaattttcaagttatcaatatccctttagggaaaaaacaactttaaacttaacctcccgcacagatcagttaaccaactctttcatcactacgcgtcgtattcctaaaaacaatggcggcagtggcggaatgggcggtggtggtagcaccacccactcaactggcggcggcacattcggtggcggcggtcgaagtttttag

SEQ ID NO: 302 - protein, 269 aa
MKKRLLPIFFLILLTFGLALPVSAAENSIDDGAQLLTPDQINQLKQEIQPLEEKTKASVFIVTTNNNTYGDEQEYADHYLLNKVGKDQNAILFLIDMDLRKIYISTSGNMIDYMTDARIDDTLDKIWDNMSQGNYFAAAQTFVQETQAFVNKGVPGGHYRVDSETGKITRYKVITPLEMVIAFAAALILSLVFLGINISKYQLKFSSYQYPFREKTTLNLTSRTDQLTNSFITTRRIPKNNGGSGGMGGGGSTTHSTGGGTFGGGGRSF

SEQ ID NO: 303 - DNA, 733 bp; double-stranded, linear
ggctgaaaattcaattgatgatggcgcacaattactgacacctgatcaaatcaaccaactaaagcaagagatacaacctttagaagaaaaaacaaaagcctctgtctttattgtaaccacaaataataatacctatggcgatgaacaagaatatgcagatcattatcttttaaataaagttggcaaggaccaaaatgcgattctttttctcattgatatggacttacggaaaatctacatctctacttctggaaacatgattgattatatgacagatgcacgaattgatgataccttagataaaatatgggataatatgagtcaaggaaattatttcgcggctgctcaaacctttgttcaggaaactcaagcatttgttaataaaggggttcctggggggcactatcgtgtggacagcgaaacaggtaaaatcactcgttataaagtcattaccccgctggaaatggtaattgcttttgctgctgcgctgatactcagtttggtcttcttaggcattaatatttctaaatatcaattaaaattttcaagttatcaatatccctttagggaaaaaacaactttaaacttaacctcccgcacagatcagttaaccaactctttcatcactacgcgtcgtattcctaaaaacaatggcggcagtggcggaatgggcggtggtggtagcaccacccactcaactggcggcggcacattcggtggcggcggtcgaagt

SEQ ID NO: 304 - protein, 244 aa
AENSIDDGAQLLTPDQINQLKQEIQPLEEKTKASVFIVTTNNNTYGDEQEYADHYLLNKVGKDQNAILFLIDMDLRKIYISTSGNMIDYMTDARIDDTLDKIWDNMSQGNYFAAAQTFVQETQAFVNKGVPGGHYRVDSETGKITRYKVITPLEMVIAFAAALILSLVFLGINISKYQLKFSSYQYPFREKTTLNLTSRTDQLTNSFITTRRIPKNNGGSGGMGGGGSTTHSTGGGTFGGGGRS

SEQ ID NO: 305 - DNA, 831 bp; double-stranded, linear
tgaatggaacgaagcaatcgtaataaaaaatcttcaaaaaaaccacttattcttggtgtttctgccttggttctaatcgctgctgccggtggcgggtattatgcttatagtcaatggcaagccaaacaagaattagccgaagcgaagaaaacagctactacatttttaaacgtattgtcaaaacaggaatttgataagttaccgtccgttgttcaagaagctagcttaaagaaaaatggctatgatactaaatctgttgttgaaaaataccaagcaatttattcagggattcaagcagaaggagtcaaagctagtgatgttcaagtcaaaaaggcgaaagacaatcaatacacatttacctataaattatcgatgagcacgcctttaggcgaaatgaaagatttgtcttatcaatcaagtatcgccaaaaaaggcgatacctaccaaatcgcttggaagccatctttaatttttccagatatgtcaggaaatgataaaatttcgattcaagtagataatgccaaacgtggagaaattgtcgatcgtaatggtagtgggctagcaattaacaaagtgtttgacgaagtgggcgtagtgcctggcaaactcggttctggcgcagaaaaaacagccaatatcaaagcttttagtgataaattcggcgtttctgttgatgaaatcaatcaaaagttaagccaaggatgggtccaagcagactcctttgtaccaatcacagtcgcttctgaaccagtgacagaattaccaacaggggctgcgacaaaagatacagagtcacgttattatccgctgggggaagcantgcgcaattaa

SEQ ID NO: 306 - protein, 275 aa
MERSNRNKKSSKKPLILGVSALVLIAAAGGGYYAYSQWQAKQELAEAKKTATTFLNVLSKQEFDKLPSVVQEASLKKNGYDTKSVVEKYQAIYSGIQAEGVKASDVQVKKAKDNQYTFTYKLSMSTPLGEMKDLSYQSSIAKKGDTYQIAWKPSLIFPDMSGNDKISIQVDNAKRGEIVDRNGSGLAINKVFDEVGVVPGKLGSGAEKTANIKAFSDKFGVSVDEINQKLSQGWVQADSFVPITVASEPVTELPTGAATKDTESRYYPLGEAXRN

SEQ ID NO: 307 - DNA, 725 bp; double-stranded, linear
tggcgggtattatgcttatagtcaatggcaagccaaacaagaattagccgaagcgaagaaaacagctactacatttttaaacgtattgtcaaaacaggaatttgataagttaccgtccgttgttcaagaagctagcttaaagaaaaatggctatgatactaaatctgttgttgaaaaataccaagcaatttattcagggattcaagcagaaggagtcaaagctagtgatgttcaagtcaaaaaggcgaaagacaatcaatacacatttacctataaattatcgatgagcacgcctttaggcgaaatgaaagatttgtcttatcaatcaagtatcgccaaaaaaggcgatacctaccaaatcgcttggaagccatctttaatttttccagatatgtcaggaaatgataaaatttcgattcaagtagataatgccaaacgtggagaaattgtcgatcgtaatggtagtgggctagcaattaacaaagtgtttgacgaagtgggcgtagtgcctggcaaactcggttctggcgcagaaaaaacagccaatatcaaagcttttagtgataaattcggcgtttctgttgatgaaatcaatcaaaagttaagccaaggatgggtccaagcagactcctttgtaccaatcacagtcgcttctgaaccagtgacagaattaccaacaggggctgcgacaaaagatacagagtcacgttattatccgctggggg

SEQ ID NO: 308 - protein, 241 aa
GGYYAYSQWQAKQELAEAKKTATTFLNVLSKQEFDKLPSVVQEASLKKNGYDTKSVVEKYQAIYSGIQAEGVKASDVQVKKAKDNQYTFTYKLSMSTPLGEMKDLSYQSSIAKKGDTYQIAWKPSLIFPDMSGNDKISIQVDNAKRGEIVDRNGSGLAINKVFDEVGVVPGKLGSGAEKTANIKAFSDKFGVSVDEINQKLSQGWVQADSFVPITVASEPVTELPTGAATKDTESRYYPLG

SEQ ID NO: 309 - DNA, 744 bp; double-stranded, linear
taaaaaatgaaaaagatcgtgcgcatttcaagcattttgttcgttgctacgcctcttatgcttttaaatagttcaaaagttgaagcagctcaagtcgcttctattcaatccaacgctgatattacgtttgctcttgataatactgtcacgccacctgtcaacccgacgaacccttctcagcctgtgacacctaatcctgctgatcctcatcaacctggtacagccggaccccttagtattgactatgtttcaaatatccattttggatcaaaacaaattcaagccggaacagcgatctattcggcacaactggatcaagtgcaaaatagtactggcgatttaattagcgtgccaaactatgttcaagtaactgacaaacgtggtctaaatcttggctggaaattatcagttaaacagagtgcgcaatttgctacaagtgattcaacacccgctgttttggataatgcatccttgacctttttagcagcaacacccaattcaacacagttactttctttggcgccattaacggtcccagtaaccttggatccaactggtgccgccacttctcctgtggcgactgccgctctttcaacaggaatgggcacttggacattagcttttggtagcggancgaccgctgctcaaggcattcaattaactgttcctgcgacaacgaaaaaagttgcagctaaacaatataaaacaacgcttacttggattttggatgatacaccactttaa

SEQ ID NO: 310 - protein, 245 aa
MKKIVRISSILFVATPLMLLNSSKVEAAQVASIQSNADITFALDNTVTPPVNPTNPSQPVTPNPADPHQPGTAGPLSIDYVSNIHFGSKQIQAGTAIYSAQLDQVQNSTGDLISVPNYVQVTDKRGLNLGWKLSVKQSAQFATSDSTPAVLDNASLTFLAATPNSTQLLSLAPLTVPVTLDPTGAATSPVATAALSTGMGTWTLAFGSGXTAAQGIQLTVPATTKKVAAKQYKTTLTWILDDTPL

SEQ ID NO: 311 - DNA, 654 bp; double-stranded, linear
agctcaagtcgcttctattcaatccaacgctgatattacgtttgctcttgataatactgtcacgccacctgtcaacccgacgaacccttctcagcctgtgacacctaatcctgctgatcctcatcaacctggtacagccggaccccttagtattgactatgtttcaaatatccattttggatcaaaacaaattcaagccggaacagcgatctattcggcacaactggatcaagtgcaaaatagtactggcgatttaattagcgtgccaaactatgttcaagtaactgacaaacgtggtctaaatcttggctggaaattatcagttaaacagagtgcgcaatttgctacaagtgattcaacacccgctgttttggataatgcatccttgacctttttagcagcaacacccaattcaacacagttactttctttggcgccattaacggtcccagtaaccttggatccaactggtgccgccacttctcctgtggcgactgccgctctttcaacaggaatgggcacttggacattagcttttggtagcggancgaccgctgctcaaggcattcaattaactgttcctgcgacaacgaaaaaagttgcagctaaacaatataaaacaacgcttacttggattttggatgatacaccact

SEQ ID NO: 312 - protein, 217 aa
AQVASIQSNADITFALDNTVTPPVNPTNPSQPVTPNPADPHQPGTAGPLSIDYVSNIHFGSKQIQAGTAIYSAQLDQVQNSTGDLISVPNYVQVTDKRGLNLGWKLSVKQSAQFATSDSTPAVLDNASLTFLAATPNSTQLLSLAPLTVPVTLDPTGAATSPVATAALSTGMGTWTLAFGSGXTAAQGIQLTVPATTKKVAAKQYKTTLTWILDDTP

SEQ ID NO: 313 - DNA, 1329 bp; double-stranded, linear
taatttaaaagacaaggagaaataaaaatgaaaaagaaaattttagcaggagcgcttgtcgctctgttttttatgcctacagctatgtttgccgcaaaaggagaccaaggtgtggattgggcgatttatcaaggtgaacaaggtcgctttggctatgcacatgataaattcgctattgcccagattggaggctacaatgctagcggtatttatgaacaatacacatataaaacgcaagtggcaagtgctattgcccaaggtaaacgtgcgcatacctatatttggtatgacacttggggaaacatggacattgcgaaaacaacaatggattactttttgccacgtattcaaacgcctaaaaattccatcgttgcattagattttgaacatggagcgttggctagtgttccagatggatatggaggatatgtaagttcagatgccgaaaaagcagcaaatacagagacaattttgtacggtatgcgcagaatcaaacaggctggctatactccaatgtattacagctataagccatttacactaaatcatgtaaactatcaacaaatcatcaaagagtttcctaactctttatggattgctgcgtatcctatcgatggtgtgtcaccatatccattgtatgcttatttcccaagcatggatggtattggtatttggcaattcacatccgcttatattgcaggtggtttagatggtaacgtagatttaacaggaattacggatagtggttatacagataccaataaaccagaaacggatacgccagcaacagatgcaggcgaagaaattgaaaaaatacctaattctgatgttaaagttggcgataccgtcaaagtgaaatttaatgtagatgcttgggcaactggggaagctattccgcaatgggtaaaaggaaacagctacaaagtgcaagaagtaactggaagcagagtattgcttgaaggtatcttgtcatggattagcaaaggtgatattgaattattgccagacgcaacagtcgtccctgataagcaaccagaagcgactcatgtggtacaatacggagaaacattatcaagtattgcttatcaatatggaacagactatcaaacgttggcggcattaaatggattggctaatccaaatcttatttatcctggtcaagttttgaaagtcaatggatcggcaacaagtaatgtctacacggttaaatacggcgataatttatctagtattgcagcaaaacttggcactacttatcaagctttagctgcattaaacggattagcaaatcctaacttgatttatccaggtcaaacattgaattattaa

SEQ ID NO: 314 - protein, 433 aa
MKKKILAGALVALFFMPTAMFAAKGDQGVDWAIYQGEQGRFGYAHDKFAIAQIGGYNASGIYEQYTYKTQVASAIAQGKRAHTYIWYDTWGNMDIAKTTMDYFLPRIQTPKNSIVALDFEHGALASVPDGYGGYVSSDAEKAANTETILYGMRRIKQAGYTPMYYSYKPFTLNHVNYQQIIKEFPNSLWIAAYPIDGVSPYPLYAYFPSMDGIGIWQFTSAYIAGGLDGNVDLTGITDSGYTDTNKPETDTPATDAGEEIEKIPNSDVKVGDTVKVKFNVDAWATGEAIPQWVKGNSYKVQEVTGSRVLLEGILSWISKGDIELLPDATVVPDKQPEATHVVQYGETLSSIAYQYGTDYQTLAALNGLANPNLIYPGQVLKVNGSATSNVYTVKYGDNLSSIAAKLGTTYQALAALNGLANPNLIYPGQTLNY

SEQ ID NO: 315 - DNA, 1228 bp; double-stranded, linear
aaaaggagaccaaggtgtggattgggcgatttatcaaggtgaacaaggtcgctttggctatgcacatgataaattcgctattgcccagattggaggctacaatgctagcggtatttatgaacaatacacatataaaacgcaagtggcaagtgctattgcccaaggtaaacgtgcgcatacctatatttggtatgacacttggggaaacatggacattgcgaaaacaacaatggattactttttgccacgtattcaaacgcctaaaaattccatcgttgcattagattttgaacatggagcgttggctagtgttccagatggatatggaggatatgtaagttcagatgccgaaaaagcagcaaatacagagacaattttgtacggtatgcgcagaatcaaacaggctggctatactccaatgtattacagctataagccatttacactaaatcatgtaaactatcaacaaatcatcaaagagtttcctaactctttatggattgctgcgtatcctatcgatggtgtgtcaccatatccattgtatgcttatttcccaagcatggatggtattggtatttggcaattcacatccgcttatattgcaggtggtttagatggtaacgtagatttaacaggaattacggatagtggttatacagataccaataaaccagaaacggatacgccagcaacagatgcaggcgaagaaattgaaaaaatacctaattctgatgttaaagttggcgataccgtcaaagtgaaatttaatgtagatgcttgggcaactggggaagctattccgcaatgggtaaaaggaaacagctacaaagtgcaagaagtaactggaagcagagtattgcttgaaggtatcttgtcatggattagcaaaggtgatattgaattattgccagacgcaacagtcgtccctgataagcaaccagaagcgactcatgtggtacaatacggagaaacattatcaagtattgcttatcaatatggaacagactatcaaacgttggcggcattaaatggattggctaatccaaatcttatttatcctggtcaagttttgaaagtcaatggatcggcaacaagtaatgtctacacggttaaatacggcgataatttatctagtattgcagcaaaacttggcactacttatcaagctttagctgcattaaacggattagcaaatcctaacttgatttatccaggtcaaacattgaat

SEQ ID NO: 316 - protein, 409 aa
KGDQGVDWAIYQGEQGRFGYAHDKFAIAQIGGYNASGIYEQYTYKTQVASAIAQGKRAHTYIWYDTWGNMDIAKTTMDYFLPRIQTPKNSIVALDFEHGALASVPDGYGGYVSSDAEKAANTETILYGMRRIKQAGYTPMYYSYKPFTLNHVNYQQIIKEFPNSLWIAAYPIDGVSPYPLYAYFPSMDGIGIWQFTSAYIAGGLDGNVDLTGITDSGYTDTNKPETDTPATDAGEEIEKIPNSDVKVGDTVKVKFNVDAWATGEAIPQWVKGNSYKVQEVTGSRVLLEGILSWISKGDIELLPDATVVPDKQPEATHVVQYGETLSSIAYQYGTDYQTLAALNGLANPNLIYPGQVLKVNGSATSNVYTVKYGDNLSSIAAKLGTTYQALAALNGLANPNLIYPGQTLN

SEQ ID NO: 317 - DNA, 1245 bp; double-stranded, linear
tagtcaaacgtttattttttccttaaatccagaaaaaatcccgtaattatggtacactacctattgaattggaggagaactatgaagaaatttgatgtaattattgtcggtgctgggacgagcggtatgatggccacgattgcggccgccgaagcaggcgctcaagtattattgattgaaaaaaatcgccgtgttgggaaaaaattattaatgactggtggcggccgctgtaatgtaaccaataatcggcccgcagaagaaatcatttcatttattcctgggaatggaaaatttttatacagcgcattttcacaatttgataactatgatatcatgaacttttttgaatccaatggtattcacttaaaagaagaagatcacggacgcatgttccctgttacagataaatcgaagtcaattgttgatgcgctatttaaccgcattaacgaattaggagtcactgtttttacaaaaacacaggtcacaaaattactacgaaaagacgatcaaataattggcgttgaaaccgaactggaaaaaatttatgcaccgtgtgttgtattaacaactggcggccgcacttatccttccacaggagcaactggtgatggctataaactagccaaaaaaatggggcataccatcagcccgctctaccctaccgaatcacctattatttctgaagaaccttttatcctggataaaacgttgcaaggtctctctttacaagatgttaatttaactgttttgaaccaaaaaggaaaacctttagttaatcatcaaatggatatgctgtttacacattttggcatttcaggacctgccgcgctccgctgttctagttttattaaccaagaattaactcgcaacggtaatcaacctgtcacggtagccttggatgtgtttccgacaaaatcttttgaagaagtgcctgccaaacaactaacagaaaagcaacgnctttcctttgtggaactactgaaagactttcagttcactgttacgaaaacattgcctttggaaaaatcttttgtcacaggcggtgggatttccctcaaagaagtgacccctaaaacaatggagagcaaattagtcaatggtttattttttgctggtgaacttttagatattaatggctatactggaggctacaatgttacagctgcatttgtcactggacatgttgctggctcccatgccgcagaaattgcagaatacacctatttaccaattgaagaagtctaa

SEQ ID NO: 318 - protein, 387 aa
MKKFDVIIVGAGTSGMMATIAAAEAGAQVLLIEKNRRVGKKLLMTGGGRCNVTNNRPAEEIISFIPGNGKFLYSAFSQFDNYDIMNFFESNGIHLKEEDHGRMFPVTDKSKSIVDALFNRINELGVTVFTKTQVTKLLRKDDQIIGVETELEKIYAPCVVLTTGGRTYPSTGATGDGYKLAKKMGHTISPLYPTESPIISEEPFILDKTLQGLSLQDVNLTVLNQKGKPLVNHQMDMLFTHFGISGPAALRCSSFINQELTRNGNQPVTVALDVFPTKSFEEVPAKQLTEKQRLSFVELLKDFQFTVTKTLPLEKSFVTGGGISLKEVTPKTMESKLVNGLFFAGELLDINGYTGGYNVTAAFVTGHVAGSHAAEIAEYTYLPIEEV

SEQ ID NO: 319 - DNA, 1093 bp; double-stranded, linear
cgaagcaggcgctcaagtattattgattgaaaaaaatcgccgtgttgggaaaaaattattaatgactggtggcggccgctgtaatgtaaccaataatcggcccgcagaagaaatcatttcatttattcctgggaatggaaaatttttatacagcgcattttcacaatttgataactatgatatcatgaacttttttgaatccaatggtattcacttaaaagaagaagatcacggacgcatgttccctgttacagataaatcgaagtcaattgttgatgcgctatttaaccgcattaacgaattaggagtcactgtttttacaaaaacacaggtcacaaaattactacgaaaagacgatcaaataattggcgttgaaaccgaactggaaaaaatttatgcaccgtgtgttgtattaacaactggcggccgcacttatccttccacaggagcaactggtgatggctataaactagccaaaaaaatggggcataccatcagcccgctctaccctaccgaatcacctattatttctgaagaaccttttatcctggataaaacgttgcaaggtctctctttacaagatgttaatttaactgttttgaaccaaaaaggaaaacctttagttaatcatcaaatggatatgctgtttacacattttggcatttcaggacctgccgcgctccgctgttctagttttattaaccaagaattaactcgcaacggtaatcaacctgtcacggtagccttggatgtgtttccgacaaaatcttttgaagaagtgcctgccaaacaactaacagaaaagcaacgnctttcctttgtggaactactgaaagactttcagttcactgttacgaaaacattgcctttggaaaaatcttttgtcacaggcggtgggatttccctcaaagaagtgacccctaaaacaatggagagcaaattagtcaatggtttattttttgctggtgaacttttagatattaatggctatactggaggctacaatgttacagctgcatttgtcactggacatgttgctggctcccatgccgcagaaattgcagaatacacctatttaccaattgaagaagtc

SEQ ID NO: 320 - protein, 364 aa
EAGAQVLLIEKNRRVGKKLLMTGGGRCNVTNNRPAEEIISFIPGNGKFLYSAFSQFDNYDIMNFFESNGIHLKEEDHGRMFPVTDKSKSIVDALFNRINELGVTVFTKTQVTKLLRKDDQIIGVETELEKIYAPCVVLTTGGRTYPSTGATGDGYKLAKKMGHTISPLYPTESPIISEEPFILDKTLQGLSLQDVNLTVLNQKGKPLVNHQMDMLFTHFGISGPAALRCSSFINQELTRNGNQPVTVALDVFPTKSFEEVPAKQLTEKQRLSFVELLKDFQFTVTKTLPLEKSFVTGGGISLKEVTPKTMESKLVNGLFFAGELLDINGYTGGYNVTAAFVTGHVAGSHAAEIAEYTYLPIEEV

SEQ ID NO: 321 - DNA, 1509 bp; double-stranded, linear
taacccatgaaatcattttgtcccgcatatggggatatgactttgacggtgatggcagcacagtccacactcatatcaaaaatctgcgggcgaactgccggaaaatatcatcaaaaccatccgcggtgtaggttaccgattggaggaatcattataatggaaagaaaagggattttcattaaggttttttcctatacgatcattgtcctgttactgcttgtcggtgtaacggcaacactgtttgcacagcaatttgtgtcttatttcagagcgatggaagcacagcaaacagtaaaatcctatcagccattggtggaactgattcagaatagcgataggcttgatatgcaagaggtggcagggctgtttcactacaataaccaatcctttgagttttatattgaagataaagagggaagcgtactctatgccacaccgaatgccgatacatcaaatagtgttaggcccgactttctttatgtggtacatagagatgataatatttcgattgttgctcaaagcaaggcaggtgtgggattgctttatcaagggctgacaattcggggaattgttatgattgcgataatggttgtattcagccttttatgcgcgtatatctttgcgcggcaaatgacaacgccgatcaaagccttagcggacagtgcgaataaaatggcaaacctgaaagaagtaccgccgccgctggagcgaaaggatgagcttggcgcactggctcacgacatgcattccatgtatatcaggctgaaagaaaccatcgcaaggctggaggatgaaatcgcaagggaacatgagttggaggaaacacagcgatatttctttgcggcagcctctcatgagttaaaaacgcccatcgcggctgtaagcgttctgttggagggaatgcttgaaaatatcggtgactacaaagaccattctaagtatctgcgcgaatgcatcaaaatgatggacaggcagggcaaaaccatttccgaaatactggagcttgtcagcctgaacgatgggagaatcgtacccatagccgaaccgctggacatagggcgcacggttgccgagctgctacccgattttcaaaccttggcagaggcaaacaaccagcggttcgtcacagatattccagccggacaaattgtcctgtccgatccgaagctgatccaaaaggcgctatccaatgtcatattgaatgcggttcagaacacgccccagggaggtgaggtacggatatggagtgagcctggggctgaaaaataccgtctttccgttttgaacatgggcgttcacattgatgatactgcactttcaaagctgttcatcccattctatcgcattgatcaggcgcgaagcagcaaaaagtgggcgaagcggtttggggcttgccatcgtacaaaaaacgctggatgccatgagcctccaatatgcgctggaaaacacctcagatggcgttttgttctggctggatttaccgcccacatcaacactataaatatttaa

SEQ ID NO: 322 - protein, 450 aa
MERKGIFIKVFSYTIIVLLLLVGVTATLFAQQFVSYFRAMEAQQTVKSYQPLVELIQNSDRLDMQEVAGLFHYNNQSFEFYIEDKEGSVLYATPNADTSNSVRPDFLYVVHRDDNISIVAQSKAGVGLLYQGLTIRGIVMIAIMVVFSLLCAYIFARQMTTPIKALADSANKMANLKEVPPPLERKDELGALAHDMHSMYIRLKETIARLEDEIAREHELEETQRYFFAAASHELKTPIAAVSVLLEGMLENIGDYKDHSKYLRECIKMMDRQGKTISEILELVSLNDGRIVPIAEPLDIGRTVAELLPDFQTLAEANNQRFVTDIPAGQIVLSDPKLIQKALSNVILNAVQNTPQGGEVRIWSEPGAEKYRLSVLNMGVHIDDTALSKLFIPFYRIDQARSSKKWAKRFGACHRTKNAGCHEPPICAGKHLRWRFVLAGFTAHINTINI

SEQ ID NO: 323 - DNA, 1259 bp; double-stranded, linear
gcaatttgtgtcttatttcagagcgatggaagcacagcaaacagtaaaatcctatcagccattggtggaactgattcagaatagcgataggcttgatatgcaagaggtggcagggctgtttcactacaataaccaatcctttgagttttatattgaagataaagagggaagcgtactctatgccacaccgaatgccgatacatcaaatagtgttaggcccgactttctttatgtggtacatagagatgataatatttcgattgttgctcaaagcaaggcaggtgtgggattgctttatcaagggctgacaattcggggaattgttatgattgcgataatggttgtattcagccttttatgcgcgtatatctttgcgcggcaaatgacaacgccgatcaaagccttagcggacagtgcgaataaaatggcaaacctgaaagaagtaccgccgccgctggagcgaaaggatgagcttggcgcactggctcacgacatgcattccatgtatatcaggctgaaagaaaccatcgcaaggctggaggatgaaatcgcaagggaacatgagttggaggaaacacagcgatatttctttgcggcagcctctcatgagttaaaaacgcccatcgcggctgtaagcgttctgttggagggaatgcttgaaaatatcggtgactacaaagaccattctaagtatctgcgcgaatgcatcaaaatgatggacaggcagggcaaaaccatttccgaaatactggagcttgtcagcctgaacgatgggagaatcgtacccatagccgaaccgctggacatagggcgcacggttgccgagctgctacccgattttcaaaccttggcagaggcaaacaaccagcggttcgtcacagatattccagccggacaaattgtcctgtccgatccgaagctgatccaaaaggcgctatccaatgtcatattgaatgcggttcagaacacgccccagggaggtgaggtacggatatggagtgagcctggggctgaaaaataccgtctttccgttttgaacatgggcgttcacattgatgatactgcactttcaaagctgttcatcccattctatcgcattgatcaggcgcgaagcagcaaaaagtgggcgaagcggtttggggcttgccatcgtacaaaaaacgctggatgccatgagcctccaatatgcgctggaaaacacctcagatggcgttttgttctggctggatttaccgcccacatcaacactataaatattt

SEQ ID NO: 324 - protein, 419 aa
QFVSYFRAMEAQQTVKSYQPLVELIQNSDRLDMQEVAGLFHYNNQSFEFYIEDKEGSVLYATPNADTSNSVRPDFLYVVHRDDNISIVAQSKAGVGLLYQGLTIRGIVMIAIMVVFSLLCAYIFARQMTTPIKALADSANKMANLKEVPPPLERKDELGALAHDMHSMYIRLKETIARLEDEIAREHELEETQRYFFAAASHELKTPIAAVSVLLEGMLENIGDYKDHSKYLRECIKMMDRQGKTISEILELVSLNDGRIVPIAEPLDIGRTVAELLPDFQTLAEANNQRFVTDIPAGQIVLSDPKLIQKALSNVILNAVQNTPQGGEVRIWSEPGAEKYRLSVLNMGVHIDDTALSKLFIPFYRIDQARSSKKWAKRFGACHRTKNAGCHEPPICAGKHLRWRFVLAGFTAHINTINI

SEQ ID NO: 325 - DNA, 2559 bp; double-stranded, linear
taactggtgggattggcaaattggttccgcgcagcgctaacagatacattgattttattacatgatgacctattgaatacagatgcagaaaaattaaataaatttactgctccgctgatgctgtatgcaaaagatccaaacatacaatggccaatttatcgtgcaacaggagctaacttaacagatatttcaatcaccgttttaggtactggacttttgttagaagataatcaacgcctagtacaagtacaagaagctgttccgtccgttttaaaaagtgtttcctctggtgatggcttatatcctgatggttccttgattcaacatggttattttccgtacaacggcagttacgggaatgagttgctaaaagggtttggacgaattcagactattttacaaggttccgactgggagatgaatgaccctaacattagtaatttatttaatgttgtggataaaggttacttacaattgatggtaaatggaaaaatgccatcgatggtttctggtagaagtatttccagagcgccagaaacgaatccttttactacagagtttgaatcgggtaaagaaacaatagctaatttaaccttaattgcaaaatttgcaccagaaaatttaagaaatgacatttatacatctatccaaacgtggcttcaacaaagtgggtcatactatcatttctttaaaaaaccaagagattttgaagcgttaattgacttgaaaaatgtagtgaatagtgcgtcacctgcccaagcgacaccaatgcaatctttaaatgtatatggttcgatggatcgagtcctacagaaaaataacgaatatgcggtggggatcagtatgtattcacaacgtgtcggaaactatgaatttgggaatacggaaaataaaaaaggctggcatacagcagacggcatgctttatttatacaatcaagactttgctcagtttgatgaaggatactgggcaacgatcgatccatatcgattaccaggaacgacagttgacacaagagaattggcaaatggtgcttatacagggaaacgcagtccccagtcatgggtaggtggctcaaataatggacaggttgcctctataggaatgtttttagataaaagtaatgaaggaatgaacttagttgctaaaaaatcttggttcttattagatggtcaaatcattaatttgggaagtggcattactggtacgacagatgcttcgattgaaacaatcctcgataatcggatgattcatccacaggaagtgaagcttaaccaaggttcagacaaagataattcttggattagtttaagcgcagcgantccattgaataacattggctatgtttttcctaattcnatgaatacgcttgatgttcaaatagaagaacgctctggtcgctacggagatattaacgaatactttgttaatgataaaacctatacaaatacatttgctaaaattagtaaaaattatggcaagactgttgaaaatggtacttacgaatatttaacagtggttgggaaaacgaatgaagaaatcgcagctctttctaaaaacaaaggctatactgttctagaaaatacagcaaacttacaagccattgaagcaggtaattatgtcatgatgaatacatggaataatgaccaagaaattgcaggactgtatgcgtatgatccaatgtcggttatttcagaaaaaattgataacggtgtttatcgcttaactcttgcgaatcctttacaaaataatgcatccgtttctattgaatttgataagggcattcttgaagtagtcgcagcggacccagaaatttctgttgaccaaaatattatcactttaaatagtgcggggttaaatggcagctcgcgttcaatcattgttaaaacaactcctgaagtaacgaaagaagcgttagaaaaattaattcaggaacaaaaagaacaccaagaaaaagactacaccgcaagcagctggaaagtctacagcgaagcattgaaacaagcacaaactgtggcagatcaaacaacagcaacgcaagcagaagtagaccaagcagaaacagagttacgttcggcagtgaagcaattggtaaaagtgccaactaaagaagtagataaaaccaacttgttgaaaatcatcaaagaaaacgagaaacaccaagaaaaagactacaccgcaagcagttggaaagtctacagtgaagcattgaagcaagcgcaaactgtggcagatcaaacaacagcaacgcaagcagaagtagaccaagcagaagcaaaactacgttcggcagtgaagcgattaacattgaaaaatagtggggaaaataaaaaggagcaaaaaaatggggggaataatggacacttaaatactagtacaggagttgatcaaactggtacgaaacaagttaagccatcaagccaaggtggtttcagaaaagctagccaatttttaccgagcacaggagaaaagaaatcgatcgcgcttgtgattattggtcttctagttatcgccagtgggtgtcttttagtttttcgtaaaagtaaatcgaagaagtaa

SEQ ID NO: 326 - protein, 851 aa
LVGLANWFRAALTDTLILLHDDLLNTDAEKLNKFTAPLMLYAKDPNIQWPIYRATGANLTDISITVLGTGLLLEDNQRLVQVQEAVPSVLKSVSSGDGLYPDGSLIQHGYFPYNGSYGNELLKGFGRIQTILQGSDWEMNDPNISNLFNVVDKGYLQLMVNGKMPSMVSGRSISRAPETNPFTTEFESGKETIANLTLIAKFAPENLRNDIYTSIQTWLQQSGSYYHFFKKPRDFEALIDLKNVVNSASPAQATPMQSLNVYGSMDRVLQKNNEYAVGISMYSQRVGNYEFGNTENKKGWHTADGMLYLYNQDFAQFDEGYWATIDPYRLPGTTVDTRELANGAYTGKRSPQSWVGGSNNGQVASIGMFLDKSNEGMNLVAKKSWFLLDGQIINLGSGITGTTDASIETILDNRMIHPQEVKLNQGSDKDNSWISLSAAXPLNNIGYVFPNSMNTLDVQIEERSGRYGDINEYFVNDKTYTNTFAKISKNYGKTVENGTYEYLTVVGKTNEEIAALSKNKGYTVLENTANLQAIEAGNYVMMNTWNNDQEIAGLYAYDPMSVISEKIDNGVYRLTLANPLQNNASVSIEFDKGILEVVAADPEISVDQNIITLNSAGLNGSSRSIIVKTTPEVTKEALEKLIQEQKEHQEKDYTASSWKVYSEALKQAQTVADQTTATQAEVDQAETELRSAVKQLVKVPTKEVDKTNLLKIIKENEKHQEKDYTASSWKVYSEALKQAQTVADQTTATQAEVDQAEAKLRSAVKRLTLKNSGENKKEQKNGGNNGHLNTSTGVDQTGTKQVKPSSQGGFRKASQFLPSTGEKKSIALVIIGLLVIASGCLLVFRKSKSKK

SEQ ID NO: 327 - DNA, 472 bp; double-stranded, linear
accagaaaatttaagaaatgacatttatacatctatccaaacgtggcttcaacaaagtgggtcatactatcatttctttaaaaaaccaagagattttgaagcgttaattgacttgaaaaatgtagtgaatagtgcgtcacctgcccaagcgacaccaatgcaatctttaaatgtatatggttcgatggatcgagtcctacagaaaaataacgaatatgcggtggggatcagtatgtattcacaacgtgtcggaaactatgaatttgggaatacggaaaataaaaaaggctggcatacagcagacggcatgctttatttatacaatcaagactttgctcagtttgatgaaggatactgggcaacgatcgatccatatcgattaccaggaacgacagttgacacaagagaattggcaaatggtgcttatacagggaaacgcagtccccagtcatgggtaggtggctcaaataat

SEQ ID NO: 328 - protein, 157 aa
PENLRNDIYTSIQTWLQQSGSYYHFFKKPRDFEALIDLKNVVNSASPAQATPMQSLNVYGSMDRVLQKNNEYAVGISMYSQRVGNYEFGNTENKKGWHTADGMLYLYNQDFAQFDEGYWATIDPYRLPGTTVDTRELANGAYTGKRSPQSWVGGSNN

SEQ ID NO: 329 - DNA, 2559 bp; double-stranded, linear; identical to SEQ ID NO: 325

SEQ ID NO: 330 - protein, 851 aa; identical to SEQ ID NO: 326

SEQ ID NO: 331 - DNA, 519 bp; double-stranded, linear
aatcggatgattcatccacaggaagtgaagcttaaccaaggttcagacaaagataattcttggattagtttaagcgcagcgantccattgaataacattggctatgtttttcctaattcnatgaatacgcttgatgttcaaatagaagaacgctctggtcgctacggagatattaacgaatactttgttaatgataaaacctatacaaatacatttgctaaaattagtaaaaattatggcaagactgttgaaaatggtacttacgaatatttaacagtggttgggaaaacgaatgaagaaatcgcagctctttctaaaaacaaaggctatactgttctagaaaatacagcaaacttacaagccattgaagcaggtaattatgtcatgatgaatacatggaataatgaccaagaaattgcaggactgtatgcgtatgatccaatgtcggttatttcagaaaaaattgataacggtgtttatcgcttaactcttgcgaatcctttacaaaataatgcatcc

SEQ ID NO: 332 - protein, 173 aa
NRMIHPQEVKLNQGSDKDNSWISLSAAXPLNNIGYVFPNSMNTLDVQIEERSGRYGDINEYFVNDKTYTNTFAKISKNYGKTVENGTYEYLTVVGKTNEEIAALSKNKGYTVLENTANLQAIEAGNYVMMNTWNNDQEIAGLYAYDPMSVISEKIDNGVYRLTLANPLQNNAS

SEQ ID NO: 333 - DNA, 2559 bp; double-stranded, linear; identical to SEQ ID NO: 325

SEQ ID NO: 334 - protein, 851 aa; identical to SEQ ID NO: 326

SEQ ID NO: 335 - DNA, 586 bp; double-stranded, linear
aactcctgaagtaacgaaagaagcgttagaaaaattaattcaggaacaaaaagaacaccaagaaaaagactacaccgcaagcagctggaaagtctacagcgaagcattgaaacaagcacaaactgtggcagatcaaacaacagcaacgcaagcagaagtagaccaagcagaaacagagttacgttcggcagtgaagcaattggtaaaagtgccaactaaagaagtagataaaaccaacttgttgaaaatcatcaaagaaaacgagaaacaccaagaaaaagactacaccgcaagcagttggaaagtctacagtgaagcattgaagcaagcgcaaactgtggcagatcaaacaacagcaacgcaagcagaagtagaccaagcagaagcaaaactacgttcggcagtgaagcgattaacattgaaaaatagtggggaaaataaaaaggagcaaaaaaatggggggaataatggacacttaaatactagtacaggagttgatcaaactggtacgaaacaagttaagccatcaagccaaggtggtttcagaaaagctagccaatttttaccgagcacaggagaaaagaaa

SEQ ID NO: 336 - protein, 195 aa
TPEVTKEALEKLIQEQKEHQEKDYTASSWKVYSEALKQAQTVADQTTATQAEVDQAETELRSAVKQLVKVPTKEVDKTNLLKIIKENEKHQEKDYTASSWKVYSEALKQAQTVADQTTATQAEVDQAEAKLRSAVKRLTLKNSGENKKEQKNGGNNGHLNTSTGVDQTGTKQVKPSSQGGFRKASQFLPSTGEKK

SEQ ID NO: 337 - DNA, 1221 bp; double-stranded, linear
tgacagatacacctgctaacacaggaaactaagaacgacagcatacacgcaagatcgggatataggtcaaaaattttttggcttatctttcggtcttttggtgcttataatacaacaaagaatgacagacataggagaatgaatatgaacagatggaaagtatatgcaacggtaatcgcttgtatgttatttggctggattggcgtggaggcgcacgcttctgaatttaattttgcggtcacaccaacaattcccgaaaatcaagtggataaatcaaaaacctactttgacttaaaaatggcgcctggtgccaaacaaaccgtagaaattcagttacgcaatgatacagatgaagacattaccattgaaaatacggtgaactcagcgacaacaaatttaaatggcgtagtagaatatggccaaaacgggatcaaacctgacaaaaccttacgttttaacttaaaagattatgtggaagcaccgaaagaaatcatcttgccgaagcattcccaaaagaccttacctttaaccattacgatgcctaaagattcttttgatggcgtgatggctggcggtataacactcaaagagaaaaagaaagaaacaacgacttctgcggatcaatcaaaagggttagctattaataatgaatactcctatgttgtggctattattcttcagcaaaatgagacaaaggttcaaccagatttaaaattactgggggttaaaccaggccaagtcaacgcgcgaaacgtcatcaatgtttctttacaaaacccacaagcggcctatttaaaccaattacatttaatcaacactgtttcaaaaggaggcgaaacgctttaccaatccgatactgaggatatgcaagtggcgccaaactctaactttagttacccaatttctttaaaaggggaacgattaacgccaggaaaatatgtcttgaaatcaacggcctatggtgtaaaagatgaaaagggcacctatcaagtcaaaggcgccaatggtgaagaacggtacctgtacaaatgggaatttacaaaagaatttactatttctggggacgtcgctaaagaattaaatgaaaaagacgtaaccattaaaggaaccaattggtggttgtatctactgattgcattaatcattctagcgctgctcttattgattttcttcttgtatcgtaaaaagaaaaaagaggaagaacaacaatctgagcaataa

SEQ ID NO: 338 - protein, 358 aa
MNRWKVYATVIACMLFGWIGVEAHASEFNFAVTPTIPENQVDKSKTYFDLKMAPGAKQTVEIQLRNDTDEDITIENTVNSATTNLNGVVEYGQNGIKPDKTLRFNLKDYVEAPKEIILPKHSQKTLPLTITMPKDSFDGVMAGGITLKEKKKETTTSADQSKGLAINNEYSYVVAIILQQNETKVQPDLKLLGVKPGQVNARNVINVSLQNPQAAYLNQLHLINTVSKGGETLYQSDTEDMQVAPNSNFSYPISLKGERLTPGKYVLKSTAYGVKDEKGTYQVKGANGEERYLYKWEFTKEFTISGDVAKELNEKDVTIKGTNWWLYLLIALIILALLLLIFFLYRKKKKEEEQQSEQ

SEQ ID NO: 339 - DNA, 703 bp; double-stranded, linear
tctgaatttaattttgcggtcacaccaacaattcccgaaaatcaagtggataaatcaaaaacctactttgacttaaaaatggcgcctggtgccaaacaaaccgtagaaattcagttacgcaatgatacagatgaagacattaccattgaaaatacggtgaactcagcgacaacaaatttaaatggcgtagtagaatatggccaaaacgggatcaaacctgacaaaaccttacgttttaacttaaaagattatgtggaagcaccgaaagaaatcatcttgccgaagcattcccaaaagaccttacctttaaccattacgatgcctaaagattcttttgatggcgtgatggctggcggtataacactcaaagagaaaaagaaagaaacaacgacttctgcggatcaatcaaaagggttagctattaataatgaatactcctatgttgtggctattattcttcagcaaaatgagacaaaggttcaaccagatttaaaattactgggggttaaaccaggccaagtcaacgcgcgaaacgtcatcaatgtttctttacaaaacccacaagcggcctatttaaaccaattacatttaatcaacactgtttcaaaaggaggcgaaacgctttaccaatccgatactgaggatatgcaagtggcgccaaactctaactttagttacccaatttctttaaaaggggaacgat

SEQ ID NO: 340 - protein, 234 aa
SEFNFAVTPTIPENQVDKSKTYFDLKMAPGAKQTVEIQLRNDTDEDITIENTVNSATTNLNGVVEYGQNGIKPDKTLRFNLKDYVEAPKEIILPKHSQKTLPLTITMPKDSFDGVMAGGITLKEKKKETTTSADQSKGLAINNEYSYVVAIILQQNETKVQPDLKLLGVKPGQVNARNVINVSLQNPQAAYLNQLHLINTVSKGGETLYQSDTEDMQVAPNSNFSYPISLKGER

SEQ ID NO: 341 - DNA, 1494 bp; double-stranded, linear
tagtctctaagaaataaacctaaaattattgatataaaggatgaacaaatgaaaaaagaagaaatgcaaatgcgtaatacacgtcgtcaaaaatcaggaaaaaataataaaaagaaagtaattattacttctttggttggactagctctggttgctgggggcagttatgtttattttcaaagtcactttttnccaaccacaaaagtaaatggagtttctgtaggctggttaaatgtaaatgctgcagaagaaaaattagcgcaagttaatcaaaccgaagaagttgtggttcaaacggggacaaaagaagaaaaaattcaacttcctaaaaaataccaattggatcaaaaatttttaaaagaccatttacacagtagcaaggtgaagctaccgttaaacgaggcattcaaaaaagaactagaagccaaattagcaactttgagttttccagaggggaaaccaagcaaaaatgcgagtatccgtcgaggcaatggcacttttgaaattgttcccgaagaacaaggcacagtagtggacacacagcgcttaaaccagcagattattgcggatgttgaagcgggaaaaggcaactatcaatataatgccaaagatttttataaagcccctgaaattacaaaagaggatcaaacgttaaaggcaacattgacaacgctcaataacaagttaaataaaacaattacagttgatattaatggtgaaaaagtagcctttgataaaacacaaattcaaaacgtgctgaatgatgatggcacaatcaacaaagaaaaactaactacttgggtgacacaattagaaacaacatatggttctgctaatcaaccagttttatttacagatgttcacggcacgacacgtcgttttaaaaacaacggaagttatggctggtcgattgatggggccaaaacgcaagaactactagtaaacgcgctgaatagccaagaacaaacgaatgcaatcactgctccgttggttggtgataccaaagaaaatagtaaaattgccaataattacattgaaattgatttaaaagatcaaaaaatgtattgtttcattgatggcaaaaaaatagtcaccacagatgtcattactggcagatataacaaaggaaccgcaacagtaccaggattccatacaattttatatcggacaaccgatgtgaatttagaaggtcaaatgcttgatggttctcgatacagtgtgccagtaaaatattggatgccgttattaagtcaagggggcgttgtcacacaaatcgggattcatgactccgaccataaattggataagtatggcgataaagaagcctttaaaaccgatgctggtagtaatggctgtatcaatacgccaggaacagaagtttcaaaaatctttgatgtatcctatgacggaatgccggtaattatttatggacatatctatgatgatgcaccaggtgaatttgataaacctgtagattacggcgaagaagtataa

SEQ ID NO: 342 - protein, 474 aa
MRNTRRQKSGKNNKKKVIITSLVGLALVAGGSYVYFQSHFXPTTKVNGVSVGWLNVNAAEEKLAQVNQTEEVVVQTGTKEEKIQLPKKYQLDQKFLKDHLHSSKVKLPLNEAFKKELEAKLATLSFPEGKPSKNASIRRGNGTFEIVPEEQGTVVDTQRLNQQIIADVEAGKGNYQYNAKDFYKAPEITKEDQTLKATLTTLNNKLNKTITVDINGEKVAFDKTQIQNVLNDDGTINKEKLTTWVTQLETTYGSANQPVLFTDVHGTTRRFKNNGSYGWSIDGAKTQELLVNALNSQEQTNAITAPLVGDTKENSKIANNYIEIDLKDQKMYCFIDGKKIVTTDVITGRYNKGTATVPGFHTILYRTTDVNLEGQMLDGSRYSVPVKYWMPLLSQGGVVTQIGIHDSDHKLDKYGDKEAFKTDAGSNGCINTPGTEVSKIFDVSYDGMPVIIYGHIYDDAPGEFDKPVDYGEEV

SEQ ID NO: 343 - DNA, 1295 bp; double-stranded, linear
cacaaaagtaaatggagtttctgtaggctggttaaatgtaaatgctgcagaagaaaaattagcgcaagttaatcaaaccgaagaagttgtggttcaaacggggacaaaagaagaaaaaattcaacttcctaaaaaataccaattggatcaaaaatttttaaaagaccatttacacagtagcaaggtgaagctaccgttaaacgaggcattcaaaaaagaactagaagccaaattagcaactttgagttttccagaggggaaaccaagcaaaaatgcgagtatccgtcgaggcaatggcacttttgaaattgttcccgaagaacaaggcacagtagtggacacacagcgcttaaaccagcagattattgcggatgttgaagcgggaaaaggcaactatcaatataatgccaaagatttttataaagcccctgaaattacaaaagaggatcaaacgttaaaggcaacattgacaacgctcaataacaagttaaataaaacaattacagttgatattaatggtgaaaaagtagcctttgataaaacacaaattcaaaacgtgctgaatgatgatggcacaatcaacaaagaaaaactaactacttgggtgacacaattagaaacaacatatggttctgctaatcaaccagttttatttacagatgttcacggcacgacacgtcgttttaaaaacaacggaagttatggctggtcgattgatggggccaaaacgcaagaactactagtaaacgcgctgaatagccaagaacaaacgaatgcaatcactgctccgttggttggtgataccaaagaaaatagtaaaattgccaataattacattgaaattgatttaaaagatcaaaaaatgtattgtttcattgatggcaaaaaaatagtcaccacagatgtcattactggcagatataacaaaggaaccgcaacagtaccaggattccatacaattttatatcggacaaccgatgtgaatttagaaggtcaaatgcttgatggttctcgatacagtgtgccagtaaaatattggatgccgttattaagtcaagggggcgttgtcacacaaatcgggattcatgactccgaccataaattggataagtatggcgataaagaagcctttaaaaccgatgctggtagtaatggctgtatcaatacgccaggaacagaagtttcaaaaatctttgatgtatcctatgacggaatgccggtaattatttatggacatatctatgatgatgcaccaggtgaatttgataaacctgtagattacggcgaagaagtat

SEQ ID NO: 344 - protein, 431 aa
TKVNGVSVGWLNVNAAEEKLAQVNQTEEVVVQTGTKEEKIQLPKKYQLDQKFLKDHLHSSKVKLPLNEAFKKELEAKLATLSFPEGKPSKNASIRRGNGTFEIVPEEQGTVVDTQRLNQQIIADVEAGKGNYQYNAKDFYKAPEITKEDQTLKATLTTLNNKLNKTITVDINGEKVAFDKTQIQNVLNDDGTINKEKLTTWVTQLETTYGSANQPVLFTDVHGTTRRFKNNGSYGWSIDGAKTQELLVNALNSQEQTNAITAPLVGDTKENSKIANNYIEIDLKDQKMYCFIDGKKIVTTDVITGRYNKGTATVPGFHTILYRTTDVNLEGQMLDGSRYSVPVKYWMPLLSQGGVVTQIGIHDSDHKLDKYGDKEAFKTDAGSNGCINTPGTEVSKIFDVSYDGMPVIIYGHIYDDAPGEFDKPVDYGEEV

SEQ ID NO: 345 - DNA, 606 bp; double-stranded, linear
taattggnggagatttttatggctaaaaaaggcggatttttcttaggngcagtaattggtggaacagcagcagccgttgccgcattattacttgcaccaaaatcaggtaaagaattacgtgatgatttatcaaatcaaacagatgatttaaaaaacaaagcgcaagattacacagattatgctgttcaaaaaggaacagaattaacagaaatcgcaaaacaaaaagccggcgttttatcagatcaagcctctgatttggcaggttctgtcaaagaaaaaacaaaagattcattggataaagcacaaggtgtttctggcgacatgcttgataactttaaaaaacaaacaggtgatttatctgatcaatttaaaaaagcagctgacgatgctcaagatcacgcagaagatttaggtgaaattgccgaagatgcagcagaagatatctatattgacgttaaagattctgcggcagcggccaaagaaactgtttctgctggtgtcgatgaagcaanagaaaccaccaaagatgttcctgaaaaagctgcagaagcaaaagaagatgttaaagatgcagcgaaagacgtaaaaaaagaatttaaagggtaa

SEQ ID NO: 346 - protein, 195 aa
MAKKGGFFLGAVIGGTAAAVAALLLAPKSGKELRDDLSNQTDDLKNKAQDYTDYAVQKGTELTEIAKQKAGVLSDQASDLAGSVKEKTKDSLDKAQGVSGDMLDNFKKQTGDLSDQFKKAADDAQDHAEDLGEIAEDAAEDIYIDVKDSAAAAKETVSAGVDEAXETTKDVPEKAAEAKEDVKDAAKDVKKEFKG

SEQ ID NO: 347 - DNA, 478 bp; double-stranded, linear
atcaaatcaaacagatgatttaaaaaacaaagcgcaagattacacagattatgctgttcaaaaaggaacagaattaacagaaatcgcaaaacaaaaagccggcgttttatcagatcaagcctctgatttggcaggttctgtcaaagaaaaaacaaaagattcattggataaagcacaaggtgtttctggcgacatgcttgataactttaaaaaacaaacaggtgatttatctgatcaatttaaaaaagcagctgacgatgctcaagatcacgcagaagatttaggtgaaattgccgaagatgcagcagaagatatctatattgacgttaaagattctgcggcagcggccaaagaaactgtttctgctggtgtcgatgaagcaanagaaaccaccaaagatgttcctgaaaaagctgcagaagcaaaagaagatgttaaagatgcagcgaaagacgtaaaaaaagaatttaaagggtaa

SEQ ID NO: 348 - protein, 158 aa
SNQTDDLKNKAQDYTDYAVQKGTELTEIAKQKAGVLSDQASDLAGSVKEKTKDSLDKAQGVSGDMLDNFKKQTGDLSDQFKKAADDAQDHAEDLGEIAEDAAEDIYIDVKDSAAAAKETVSAGVDEAXETTKDVPEKAAEAKEDVKDAAKDVKKEFKG

SEQ ID NO: 349 - DNA, 336 bp; double-stranded, linear
taaggggatgaagaaaaaatggcaaaaaaaacaattatgttagtttgttccgcaggaatgagcacgagtttattagtaacaaaaatgcaaaaagcagcagaagatcgtggcatggaagcagacatctttgcagtatcggcttctgaagcagatacaaacttggaaaataaagaggtgaatgttttacttttaggtccacaagttcgtttcatgaaagggcaatttgaacaaaaattacaaccaaaagggattcctttagatgtaattaacatggcagattatggcatgatgaatggcgaaaaagttttagatcaagcaatctcattaatgggataa

SEQ ID NO: 350 - protein, 105 aa
MAKKTIMLVCSAGMSTSLLVTKMQKAAEDRGMEADIFAVSASEADTNLENKEVNVLLLGPQVRFMKGQFEQKLQPKGIPLDVINMADYGMMNGEKVLDQAISLMG

SEQ ID NO: 351 - DNA, 236 bp; double-stranded, linear
agaagatcgtggcatggaagcagacatctttgcagtatcggcttctgaagcagatacaaacttggaaaataaagaggtgaatgttttacttttaggtccacaagttcgtttcatgaaagggcaatttgaacaaaaattacaaccaaaagggattcctttagatgtaattaacatggcagattatggcatgatgaatggcgaaaaagttttagatcaagcaatctcattaatgggat

SEQ ID NO: 352 - protein, 78 aa
EDRGMEADIFAVSASEADTNLENKEVNVLLLGPQVRFMKGQFEQKLQPKGIPLDVINMADYGMMNGEKVLDQAISLMG

SEQ ID NO: 353 - DNA, 384 bp; double-stranded, linear
tagtttttttccgataaagggagaattttaatgaggcaaaaatattcaggaaacttattgttcacggccatggccattgtttatttgatgagttttctcgcccttcagttactagaagaacgtcagttaacacaaaaatttacgcaagctacccaggaatactatgcagggaaaagtatctttcatttatttcttgcagatgttaaacaaaatagacgaaagttaaaaacagaagaaaggctcgtatacgcgcaagtgaccctcgattatacatacaaaaatgaacaattaagaataactgttttattaaacaaatctggtcgaaaataccaatatcaagagagagtttctcatcaaaaaaaagcggaaacaatactggaatag

SEQ ID NO: 354 - protein, 117 aa
MRQKYSGNLLFTAMAIVYLMSFLALQLLEERQLTQKFTQATQEYYAGKSIFHLFLADVKQNRRKLKTEERLVYAQVTLDYTYKNEQLRITVLLNKSGRKYQYQERVSHQKKAETILE

SEQ ID NO: 355 - DNA, 278 bp; double-stranded, linear
ccttcagttactagaagaacgtcagttaacacaaaaatttacgcaagctacccaggaatactatgcagggaaaagtatctttcatttatttcttgcagatgttaaacaaaatagacgaaagttaaaaacagaagaaaggctcgtatacgcgcaagtgaccctcgattatacatacaaaaatgaacaattaagaataactgttttattaaacaaatctggtcgaaaataccaatatcaagagagagtttctcatcaaaaaaaagcggaaacaatactgg

SEQ ID NO: 356 - protein, 91 aa
LQLLEERQLTQKFTQATQEYYAGKSIFHLFLADVKQNRRKLKTEERLVYAQVTLDYTYKNEQLRITVLLNKSGRKYQYQERVSHQKKAETI

SEQ ID NO: 357 - DNA, 3294 bp; double-stranded, linear
taaacatttgagacattcagaggtgaatgtctcttttttattactcaaaaacgaaaggggattaattatatgaaaaaaacaacatttaaaaattggtcgttatttgcgactttggctctattaagtcaaacaattggcggaacgattggtcctacgattgcttttgccgatgaaattactcaccctcaagaggtaacaattcattatgacgtaagtaaactgtatgaagttgacggaacttttagcgatggcagcacgctctcagaacgtactacgtcattatatgcagaatacaatggtgcaaaacaaacagtattttgtattgaaccaggtgttagtattccaacagaagtgacgcacggttatcagaaaaaccctttgccatcaatgtctgataaagcgaaactagtatcggttctttgggaaaaggctggaacagatattgatacaaatatggttgcacaaaagatgatttgggaagaagtgaacggttataaactccattccataaaaagattaggtggtgcttcagttgatataaaatctattgaaggaaaaattaataaggcaattgaggagtatcaaaaaaaaccaagttttcataataccactgtaaaaacaattttaggtcaatcgacaactttaatagataaaaatgaattaaatttatctgagtttgataaagtcgtccaaaatacggcgaatatagattaccgtgtaattgggaatcaattagtgcttactccaaactctaattccaaatcaggaacattaacattgaaaaaatcagctggtactggaactccagtcgcttataaaaaagcaggacttcaaactgtgatggctggtgcgcttgataagcccaatacctacgctattaaaattaatgtggaaactaagggttctttaaagatcaaaaaaatcgataaagaatcaggtgatattgtaccagaaacggttttccatttagattttgggaaagctttaccttcaaaagatgtgacaacagataaagatgggatttctattttggatggaattccccatggtacaaaggtaactattactgaaaaatcggtgccagatccttatatgattgataccacacccatggctgccaccattaaagcgggcgagaccatttccatgacttcgaaaaatatgcgacaaaaaggtcaaattcttttagagaagactggggtagaaacaggtactgatctttggaatgacaattattctctagctggaaatacatttgccattcgtaaagacagcccagctggtgaaattgtccaagaaataacaacggatgaaaaaggtcgtgcggaaacaccaaaagagcttgctaatgctttggaactgggaacctattacgtgacagaaactaaatctagtaatggtttcgtgaataccttcaaaccaacaaaagtcgagttaaaatatgccaatcaaaccgtggctcttgttaccagtaacgtaaaagggcaaaaccaagaaattactggggaaaccactttgacaaaagaagacaaagataccggtaatgagagtcaagggaaagctgagtttaaaggagctgaatatactctctttactgcaaaagatggtcaagctgttaaatggagtgaagcttttaaaacagaattagtgaagggaacgaaagcttctgatgaaacagtgactttggctttagatgaaaagaaccaagttgccgttaaacacctagcaattaacgagtatttctggcaagaaaccaaagcacctgaaggatatactttggatgaaacgaagtatcctgtatccatcaaaaaagttgataataacgaaaaaaatgccgtaattactcgagatgttacggcaaaagaacaagttattcgctttggctttgatttctttaaatttgctggatcggctgatggcactgccgaaactggatttaacgacttatcttttaaagtgtcgccattggaagggaccaangaaatcacaggtgctgaagataaagcgaccacagcttgtaacgagcaattaggttttgatggctatggtaagtttgaaaatcttccttatggggattatttacttgaagaaatagaggctccagaaggatttcaaaagattacaccactagaaatccgttctacatttaaggaaaacaaagacgactatgcgaagagtgagtatgtctttaccattaccgaagaaggacaaaaacaaccaattaagatggtgaccgttccttacgagaaactaactaacaacgagttttctgttagtctgaaccgtttgatgctttatgatttgcccgagaaagaagatagtttgacttctcttgcgacttggaaagacggaaataaaaaattgaatacccttgattttaccgagctagttgataaattgagatataacttgcatgaaatcaaagaagactggtatgtcgtagctcaagccattgatgtggaagccacaaaagctgcccaagaaaaagacgaaaaagccaaaccggtggtgattgccgaaacaaccgcaacgttggcgaacaaagagaaaactggaacttggaaaattctgcataaattaaccgctgaacaagttttggataaaagcatcgtcttgttcaattatgtgtatgaaaacaaggtagcctttgaagcaggcaatgagccagtagcgaaggatgctagcttgaacaatcaagcacaaaccgtcaattgtacgattgaacgccatgtttccatccaaacaaaagcccacctagaagatggttcgcaaacttttactcatggtgacgtgatggatatgtttgatgatgtgtcggttacccatgatgtactggatggctcaaaagaagctttcgaaacaattctgtatgctttactaccagatggtacgaacaaagaaatttggaaatctggcaaaattgagcatgaagtgaatgataaagaatttaccaaaaccgtacttgcggaaaaagtagataccggaaagtatccagaaggaactaagtttacttttacggaaatcaattacgaaaaagatggaaacgtgaatggaaaacacaatgaagatttgaaagaaaaatctcaaaccttaacaccaaaagaagtgccaaccataccgagtacgccaaaacaaccggaaacaccagctgttccaagtaattctcaagaatctagtcccacagtgaagacattcccgcaaactggggagaaaaattccaacgttctactgttagttggctttatcttgattttttcgactgctgggtattatttctggaatcgccgcaattaa

SEQ ID NO: 358 - protein, 1074 aa
MKKTTFKNWSLFATLALLSQTIGGTIGPTIAFADEITHPQEVTIHYDVSKLYEVDGTFSDGSTLSERTTSLYAEYNGAKQTVFCIEPGVSIPTEVTHGYQKNPLPSMSDKAKLVSVLWEKAGTDIDTNMVAQKMIWEEVNGYKLHSIKRLGGASVDIKSIEGKINKAIEEYQKKPSFHNTTVKTILGQSTTLIDKNELNLSEFDKVVQNTANIDYRVIGNQLVLTPNSNSKSGTLTLKKSAGTGTPVAYKKAGLQTVMAGALDKPNTYAIKINVETKGSLKIKKIDKESGDIVPETVFHLDFGKALPSKDVTTDKDGISILDGIPHGTKVTITEKSVPDPYMIDTTPMAATIKAGETISMTSKNMRQKGQILLEKTGVETGTDLWNDNYSLAGNTFAIRKDSPAGEIVQEITTDEKGRAETPKELANALELGTYYVTETKSSNGFVNTFKPTKVELKYANQTVALVTSNVKGQNQEITGETTLTKEDKDTGNESQGKAEFKGAEYTLFTAKDGQAVKWSEAFKTELVKGTKASDETVTLALDEKNQVAVKHLAINEYFWQETKAPEGYTLDETKYPVSIKKVDNNEKNAVITRDVTAKEQVIRFGFDFFKFAGSADGTAETGFNDLSFKVSPLEGTXEITGAEDKATTACNEQLGFDGYGKFENLPYGDYLLEEIEAPEGFQKITPLEIRSTFKENKDDYAKSEYVFTITEEGQKQPIKMVTVPYEKLTNNEFSVSLNRLMLYDLPEKEDSLTSLATWKDGNKKLNTLDFTELVDKLRYNLHEIKEDWYVVAQAIDVEATKAAQEKDEKAKPVVIAETTATLANKEKTGTWKILHKLTAEQVLDKSIVLFNYVYENKVAFEAGNEPVAKDASLNNQAQTVNCTIERHVSIQTKAHLEDGSQTFTHGDVMDMFDDVSVTHDVLDGSKEAFETILYALLPDGTNKEIWKSGKIEHEVNDKEFTKTVLAEKVDTGKYPEGTKFTFTEINYEKDGNVNGKHNEDLKEKSQTLTPKEVPTIPSTPKQPETPAVPSNSQESSPTVKTFPQTGEKNSNVLLLVGFILIFSTAGYYFWNRRN

SEQ ID NO: 359 - DNA, 1511 bp; double-stranded, linear
cgatgaaattactcaccctcaagaggtaacaattcattatgacgtaagtaaactgtatgaagttgacggaacttttagcgatggcagcacgctctcagaacgtactacgtcattatatgcagaatacaatggtgcaaaacaaacagtattttgtattgaaccaggtgttagtattccaacagaagtgacgcacggttatcagaaaaaccctttgccatcaatgtctgataaagcgaaactagtatcggttctttgggaaaaggctggaacagatattgatacaaatatggttgcacaaaagatgatttgggaagaagtgaacggttataaactccattccataaaaagattaggtggtgcttcagttgatataaaatctattgaaggaaaaattaataaggcaattgaggagtatcaaaaaaaaccaagttttcataataccactgtaaaaacaattttaggtcaatcgacaactttaatagataaaaatgaattaaatttatctgagtttgataaagtcgtccaaaatacggcgaatatagattaccgtgtaattgggaatcaattagtgcttactccaaactctaattccaaatcaggaacattaacattgaaaaaatcagctggtactggaactccagtcgcttataaaaaagcaggacttcaaactgtgatggctggtgcgcttgataagcccaatacctacgctattaaaattaatgtggaaactaagggttctttaaagatcaaaaaaatcgataaagaatcaggtgatattgtaccagaaacggttttccatttagattttgggaaagctttaccttcaaaagatgtgacaacagataaagatgggatttctattttggatggaattccccatggtacaaaggtaactattactgaaaaatcggtgccagatccttatatgattgataccacacccatggctgccaccattaaagcgggcgagaccatttccatgacttcgaaaaatatgcgacaaaaaggtcaaattcttttagagaagactggggtagaaacaggtactgatctttggaatgacaattattctctagctggaaatacatttgccattcgtaaagacagcccagctggtgaaattgtccaagaaataacaacggatgaaaaaggtcgtgcggaaacaccaaaagagcttgctaatgctttggaactgggaacctattacgtgacagaaactaaatctagtaatggtttcgtgaataccttcaaaccaacaaaagtcgagttaaaatatgccaatcaaaccgtggctcttgttaccagtaacgtaaaagggcaaaaccaagaaattactggggaaaccactttgacaaaagaagacaaagataccggtaatgagagtcaagggaaagctgagtttaaaggagctgaatatactctctttactgcaaaagatggtcaagctgttaaatggagtgaagcttttaaaacagaattagtgaagggaacgaaagcttctgatgaaacag

SEQ ID NO: 360 - protein, 503 aa
DEITHPQEVTIHYDVSKLYEVDGTFSDGSTLSERTTSLYAEYNGAKQTVFCIEPGVSIPTEVTHGYQKNPLPSMSDKAKLVSVLWEKAGTDIDTNMVAQKMIWEEVNGYKLHSIKRLGGASVDIKSIEGKINKAIEEYQKKPSFHNTTVKTILGQSTTLIDKNELNLSEFDKVVQNTANIDYRVIGNQLVLTPNSNSKSGTLTLKKSAGTGTPVAYKKAGLQTVMAGALDKPNTYAIKINVETKGSLKIKKIDKESGDIVPETVFHLDFGKALPSKDVTTDKDGISILDGIPHGTKVTITEKSVPDPYMIDTTPMAATIKAGETISMTSKNMRQKGQILLEKTGVETGTDLWNDNYSLAGNTFAIRKDSPAGEIVQEITTDEKGRAETPKELANALELGTYYVTETKSSNGFVNTFKPTKVELKYANQTVALVTSNVKGQNQEITGETTLTKEDKDTGNESQGKAEFKGAEYTLFTAKDGQAVKWSEAFKTELVKGTKASDET

SEQ ID NO: 361 - DNA, 2334 bp; double-stranded, linear
taagaattgttggattgttctttagaaagaagggacaatatgaagcgaagtaaatggaaagaattgatagtaacgggcatctgccatatattagtattccccatactaatacagacaactgtttttgcagaaacattaccaagtacaaaacaagtaagagaaggaaccaatcattcattaacagcagaaaaagccgaaagtgaacaaccacagacaaaggataaactacatgatgaagaaacactggcattgtcaaaaagtgagttaatcgataatgaggctaatgttacaagtcaaacgattagagaaagaattgagacgcctaacctaacttatcgttatggatttattaatgaagaggggcagccagtaaacgccaatgagatccttctacagtatcatagttggcaaggcaattccccagatggcataaatgtgtgggaaggtgaaagtcaaccagtgacagcatctacagtggctaatttaaaagaagtggtaattccaagtgagaaagtagccgtctattccgacatgtcaacggtgcttgcagcgagtaatcaaacattttttttaccaagatattatacttctttaagcttatacaataagaaaggggaaattgatcccaattatccgctgccaactatttccgacgcatcaggaaaccaatatccaacaacaatttcgcaatttgaattggaaaaaatgtctgcacaacaatatagtcagaaaacaggagtaacgtttaacattagcgagagtcaaaaactaatcgttcctttgtacaaccaagtgaaggttgattcatcgaatcaatctgggctattgaattactttaaattttcagggccggtttattatcatgttaccaatcgcaaagtgacagaacattttgtggatactcaagggaaaccaatccctccaccaccggggtttagacaaggaaagcaaacacttattgagcgtgacccttacacctttaaacagaaagatcttttgccaagtagctatgaaattgactcaaaaacgtatcaatttcaaggatggtataaagggaaaacgaaacctgaaaatttagaaaaaagcgtaacgcccagttatgatattacctatgacgacaatgatgatttaactgttgtctataaggagatacctcaaaaaaattatacatttgaggatgtcaatggtgttgaaattgcaccaccatctgattttattcaggatcaccaacaaccaataactacggatggctttcgctatttagctggaaaaaaactgccacaacaatacagcgttaacggtaaaacttatttatatcaaggttggtatcaagataaaacnaaacaagagagcttagaaaaaacgaagcgacccataaactcccctgtttttaatgaaatgaacgctattacagcagtgtataaggaaataactgcaaaagctgaaatgcaaatagaaggactagtcaaagtcatgccaagtggttatatacaaatttggcagattatgcttacaaatgtgggagaagtaccgttaaaaaaaataaacttaaagccagcaagtggttggtcaccaggtctagctcggccaatccaagtcacgattcgtgttggatctgaaccaaacaaaattgttcctattactgatgaaaattggcgagttggcattactttaaatacggaagtgcctattggtcagacagcaactattatgatgacaacaattgctacaggtgaaccagatcaagtgttacaagcggctgttgaaatgaatggaaatttttctgctgttcacgcagctgatactgtcagaatccaacctaaaaatcaagaaattgtggcaccagatgaggaaggttttatcagcacaccaacttttgattttggcaaagtcgccatttctagcaacacgcagcaacatggtttaaagcaggcagcagattattatgaaaatggtcaggaaaatccatatttacgtttgaaaaaatcacaacccaattgggcactaactgcagaactatccccctttgaaggaagagtggatcaactatcatcaatgacaaagttattgttaggaacaaccaatgtttcaggttttattcagtacaatcaaccaacggaaactaaagttgctcttggcaaaacaaccgctattcaattagttgccaacggtgtagctagccatattgttgccaatggtcagtttgacgaaagtgatgtttatcaatttgatttttcttttgatcaaatcaaattagaaattccagcaaatcaaggtagaaaagatcaaacttatcaagcaatggtgacttggaatttagtgacaggcccataa

SEQ ID NO: 362 - protein, 764 aa
MKRSKWKELIVTGICHILVFPILIQTTVFAETLPSTKQVREGTNHSLTAEKAESEQPQTKDKLHDEETLALSKSELIDNEANVTSQTIRERIETPNLTYRYGFINEEGQPVNANEILLQYHSWQGNSPDGINVWEGESQPVTASTVANLKEVVIPSEKVAVYSDMSTVLAASNQTFFLPRYYTSLSLYNKKGEIDPNYPLPTISDASGNQYPTTISQFELEKMSAQQYSQKTGVTFNISESQKLIVPLYNQVKVDSSNQSGLLNYFKFSGPVYYHVTNRKVTEHFVDTQGKPIPPPPGFRQGKQTLIERDPYTFKQKDLLPSSYEIDSKTYQFQGWYKGKTKPENLEKSVTPSYDITYDDNDDLTVVYKEIPQKNYTFEDVNGVEIAPPSDFIQDHQQPITTDGFRYLAGKKLPQQYSVNGKTYLYQGWYQDKTKQESLEKTKRPINSPVFNEMNAITAVYKEITAKAEMQIEGLVKVMPSGYIQIWQIMLTNVGEVPLKKINLKPASGWSPGLARPIQVTIRVGSEPNKIVPITDENWRVGITLNTEVPIGQTATIMMTTIATGEPDQVLQAAVEMNGNFSAVHAADTVRIQPKNQEIVAPDEEGFISTPTFDFGKVAISSNTQQHGLKQAADYYENGQENPYLRLKKSQPNWALTAELSPFEGRVDQLSSMTKLLLGTTNVSGFIQYNQPTETKVALGKTTAIQLVANGVASHIVANGQFDESDVYQFDFSFDQIKLEIPANQGRKDQTYQAMVTWNLVTGP

SEQ ID NO: 363 - DNA, 2191 bp; double-stranded, linear
aagtacaaaacaagtaagagaaggaaccaatcattcattaacagcagaaaaagccgaaagtgaacaaccacagacaaaggataaactacatgatgaagaaacactggcattgtcaaaaagtgagttaatcgataatgaggctaatgttacaagtcaaacgattagagaaagaattgagacgcctaacctaacttatcgttatggatttattaatgaagaggggcagccagtaaacgccaatgagatccttctacagtatcatagttggcaaggcaattccccagatggcataaatgtgtgggaaggtgaaagtcaaccagtgacagcatctacagtggctaatttaaaagaagtggtaattccaagtgagaaagtagccgtctattccgacatgtcaacggtgcttgcagcgagtaatcaaacattttttttaccaagatattatacttctttaagcttatacaataagaaaggggaaattgatcccaattatccgctgccaactatttccgacgcatcaggaaaccaatatccaacaacaatttcgcaatttgaattggaaaaaatgtctgcacaacaatatagtcagaaaacaggagtaacgtttaacattagcgagagtcaaaaactaatcgttcctttgtacaaccaagtgaaggttgattcatcgaatcaatctgggctattgaattactttaaattttcagggccggtttattatcatgttaccaatcgcaaagtgacagaacattttgtggatactcaagggaaaccaatccctccaccaccggggtttagacaaggaaagcaaacacttattgagcgtgacccttacacctttaaacagaaagatcttttgccaagtagctatgaaattgactcaaaaacgtatcaatttcaaggatggtataaagggaaaacgaaacctgaaaatttagaaaaaagcgtaacgcccagttatgatattacctatgacgacaatgatgatttaactgttgtctataaggagatacctcaaaaaaattatacatttgaggatgtcaatggtgttgaaattgcaccaccatctgattttattcaggatcaccaacaaccaataactacggatggctttcgctatttagctggaaaaaaactgccacaacaatacagcgttaacggtaaaacttatttatatcaaggttggtatcaagataaaacnaaacaagagagcttagaaaaaacgaagcgacccataaactcccctgtttttaatgaaatgaacgctattacagcagtgtataaggaaataactgcaaaagctgaaatgcaaatagaaggactagtcaaagtcatgccaagtggttatatacaaatttggcagattatgcttacaaatgtgggagaagtaccgttaaaaaaaataaacttaaagccagcaagtggttggtcaccaggtctagctcggccaatccaagtcacgattcgtgttggatctgaaccaaacaaaattgttcctattactgatgaaaattggcgagttggcattactttaaatacggaagtgcctattggtcagacagcaactattatgatgacaacaattgctacaggtgaaccagatcaagtgttacaagcggctgttgaaatgaatggaaatttttctgctgttcacgcagctgatactgtcagaatccaacctaaaaatcaagaaattgtggcaccagatgaggaaggttttatcagcacaccaacttttgattttggcaaagtcgccatttctagcaacacgcagcaacatggtttaaagcaggcagcagattattatgaaaatggtcaggaaaatccatatttacgtttgaaaaaatcacaacccaattgggcactaactgcagaactatccccctttgaaggaagagtggatcaactatcatcaatgacaaagttattgttaggaacaaccaatgtttcaggttttattcagtacaatcaaccaacggaaactaaagttgctcttggcaaaacaaccgctattcaattagttgccaacggtgtagctagccatattgttgccaatggtcagtttgacgaaagtgatgtttatcaatttgatttttcttttgatcaaatcaaattagaaattccagcaaatcaaggtagaaaagatcaaacttatcaagcaatggtgacttggaatttagtgacaggccca

SEQ ID NO: 364 - protein, 730 aa
STKQVREGTNHSLTAEKAESEQPQTKDKLHDEETLALSKSELIDNEANVTSQTIRERIETPNLTYRYGFINEEGQPVNANEILLQYHSWQGNSPDGINVWEGESQPVTASTVANLKEVVIPSEKVAVYSDMSTVLAASNQTFFLPRYYTSLSLYNKKGEIDPNYPLPTISDASGNQYPTTISQFELEKMSAQQYSQKTGVTFNISESQKLIVPLYNQVKVDSSNQSGLLNYFKFSGPVYYHVTNRKVTEHFVDTQGKPIPPPPGFRQGKQTLIERDPYTFKQKDLLPSSYEIDSKTYQFQGWYKGKTKPENLEKSVTPSYDITYDDNDDLTVVYKEIPQKNYTFEDVNGVEIAPPSDFIQDHQQPITTDGFRYLAGKKLPQQYSVNGKTYLYQGWYQDKTKQESLEKTKRPINSPVFNEMNAITAVYKEITAKAEMQIEGLVKVMPSGYIQIWQIMLTNVGEVPLKKINLKPASGWSPGLARPIQVTIRVGSEPNKIVPITDENWRVGITLNTEVPIGQTATIMMTTIATGEPDQVLQAAVEMNGNFSAVHAADTVRIQPKNQEIVAPDEEGFISTPTFDFGKVAISSNTQQHGLKQAADYYENGQENPYLRLKKSQPNWALTAELSPFEGRVDQLSSMTKLLLGTTNVSGFIQYNQPTETKVALGKTTAIQLVANGVASHIVANGQFDESDVYQFDFSFDQIKLEIPANQGRKDQTYQAMVTWNLVTGP

SEQ ID NO: 365 - DNA, 1092 bp; double-stranded, linear
tgaggtggccaagttaaaatgaaaaaattacagtcactttttattggaattatcgctattattgtcatcttgttttttggcgtgcgccaattggagaaagcaagtggcatggcaggagcagataccttgaccatttacaattggggggactatatagatccggccttgattaagaaatttgaaaaagaaacaggctataaagtcaattacgaaacctttgattctaatgaagctatgtatacaaaaattcagcaaggtggcacagcctatgatattgccattccttctgaatatatgattcaaaaaatgatgaaagcgaagatgcttttaccacttgatcacagcaaattaaaaggcttagaaaacattgatgcacgctttttagatcaatcctttgatcccaaaaataagttttccgttccgtacttctggggcacgttggggattatttataatgataaatttattgacggccgtcagatccaacattgggatgatttatggcgcccggaattaaaaaataatgtcatgctgattgatggcgctcgcgaagtgttaggattatctttgaacagtttaggctattcgttaaacagtaaaaacgaccaacaattacgtcaggctaccgataagttaaaccgattaacgaacaatgtcaaagcaattgttgccgatgaaatcaaaatgtacatggctaatgaagaaagtgcagttgctgtaactttctctggtgaagctgctgaaatgctagaaaacaatgaacatctacattatgtgattcccagtgaaggctctaatctctggtttgataacattgtgatgcctaagacagccaaaaataaagagggtgcctatgcatttatgaactttatgttacgaccagaaaatgcggcacaaaatgcagaatatattggttattccacaccaaataaagaagctaaaaaactattaccaaaagaagttgccgaagataaacaattttatccagatgatgaaactatcaaacatttagaagtttaccaagacttaggtcaagaatacttaggaatttataacgatctgttcttggagtttaagatgtatcggaaataa

SEQ ID NO: 366 - protein, 357 aa
MKKLQSLFIGIIAIIVILFFGVRQLEKASGMAGADTLTIYNWGDYIDPALIKKFEKETGYKVNYETFDSNEAMYTKIQQGGTAYDIAIPSEYMIQKMMKAKMLLPLDHSKLKGLENIDARFLDQSFDPKNKFSVPYFWGTLGIIYNDKFIDGRQIQHWDDLWRPELKNNVMLIDGAREVLGLSLNSLGYSLNSKNDQQLRQATDKLNRLTNNVKAIVADEIKMYMANEESAVAVTFSGEAAEMLENNEHLHYVIPSEGSNLWFDNIVMPKTAKNKEGAYAFMNFMLRPENAAQNAEYIGYSTPNKEAKKLLPKEVAEDKQFYPDDETIKHLEVYQDLGQEYLGIYNDLFLEFKMYRK

SEQ ID NO: 367 - DNA, 988 bp; double-stranded, linear
aagtggcatggcaggagcagataccttgaccatttacaattggggggactatatagatccggccttgattaagaaatttgaaaaagaaacaggctataaagtcaattacgaaacctttgattctaatgaagctatgtatacaaaaattcagcaaggtggcacagcctatgatattgccattccttctgaatatatgattcaaaaaatgatgaaagcgaagatgcttttaccacttgatcacagcaaattaaaaggcttagaaaacattgatgcacgctttttagatcaatcctttgatcccaaaaataagttttccgttccgtacttctggggcacgttggggattatttataatgataaatttattgacggccgtcagatccaacattgggatgatttatggcgcccggaattaaaaaataatgtcatgctgattgatggcgctcgcgaagtgttaggattatctttgaacagtttaggctattcgttaaacagtaaaaacgaccaacaattacgtcaggctaccgataagttaaaccgattaacgaacaatgtcaaagcaattgttgccgatgaaatcaaaatgtacatggctaatgaagaaagtgcagttgctgtaactttctctggtgaagctgctgaaatgctagaaaacaatgaacatctacattatgtgattcccagtgaaggctctaatctctggtttgataacattgtgatgcctaagacagccaaaaataaagagggtgcctatgcatttatgaactttatgttacgaccagaaaatgcggcacaaaatgcagaatatattggttattccacaccaaataaagaagctaaaaaactattaccaaaagaagttgccgaagataaacaattttatccagatgatgaaactatcaaacatttagaagtttaccaagacttaggtcaagaatacttaggaatttataacgatctgttcttggagtttaagatgtatcggaaa

SEQ ID NO: 368 - protein, 329 aa
SGMAGADTLTIYNWGDYIDPALIKKFEKETGYKVNYETFDSNEAMYTKIQQGGTAYDIAIPSEYMIQKMMKAKMLLPLDHSKLKGLENIDARFLDQSFDPKNKFSVPYFWGTLGIIYNDKFIDGRQIQHWDDLWRPELKNNVMLIDGAREVLGLSLNSLGYSLNSKNDQQLRQATDKLNRLTNNVKAIVADEIKMYMANEESAVAVTFSGEAAEMLENNEHLHYVIPSEGSNLWFDNIVMPKTAKNKEGAYAFMNFMLRPENAAQNAEYIGYSTPNKEAKKLLPKEVAEDKQFYPDDETIKHLEVYQDLGQEYLGIYNDLFLEFKMYRK

SEQ ID NO: 369 - DNA, 1788 bp; double-stranded, linear
tagaagtattctaattatctacatagagagcgagggacaaggaatatgaaggaaaaagaaatgcattcgctcttttttaaacataagtttgtgaaagtaactccctatttacgtcgttttggtcatcgtttgagtgggatgattatgccaaatttgagtatttttattgcgtggagcttattgtctttggtggctggctatacgactgggaatctacggctagctctttctgaagtcgaaacgataatgattcgagttgttttaccgattctaattggttttacaggcggaaaaatgttcgaggaacaacgtggcggcgttgttgctgctattgcgacagtgggcgtgattgtttccacagatgttccacagttgtttggtgctatgtttattggccctttagcaggatatactttcgccaaaattgaacaaattctcttaccgaaagttaaagaaggctacgagatgctgactaaaaactttttagcaggaattgtgggaggactgctgtgctgttttggtattctggttgtagctccggctgttgaaagcgctagtttttggctgtatcaattttcttcttggttaattgaagccaatcttttaccattggttcacgttttcttagagcccttaaaagtgttattttttaataatgcgattaaccatggcttattaacgcctctaggtttagaaggtgctagtcaaacaggtcagtccattttatttctattggaaacaaaccctggaccaggcgtgggcgttttggttgcttttctgctgtttgggcctgtaggacaacgaaaaacagcaggaggtgccaccatgattcaactgattgggggcattcatgaaatttattttccgtttgttttgatggacccgcgcttatttttagcagtaattgctggaggaatgagtggtacgcttgtttttcaaatatttaatgtgggtctaagtgctccagcttcgccaggttcattggttgcgattttagccaatgccccgactgatgcgaggctggcggtttttagcggaatttttgttagctttctgtgctcttttgcaatagcaagcttgttattaaaacgtcaacgaggaattgaaccagtttcaatgataaagatgaaggaggaagaccaagtggaaacagtcacacctaactatcagcaaattttatttgtttgtgatgcaggaatgggctcaagtgccatgggggctagtttgctaagccgacaattaaaagctgtgaacttggagatgcctgtgacttaccagtccgttcatcagatgaagtggcagcctaagacattagtggtcattcaagcagaattgaaacagttagcacaaaagtacgtcccagaaaaggatatggtgagtgttcaaaattttttagaaattaaatcctattacccgcaagttttagccaaactgactgcttcttctcaagagcaatcttcacttggttcagagtctactgaaacgaactcgacaaaacaaatacagaagcttgtttttttatatgccgagaatgttcgaggatcgcaaacaatgggaatggaattattgcggcaacaagcggcgaaacaaggagtcgcgattgaagtatctaaagagccactggaaacagtcttttttaccaaggagacaacctacgtagtgactcgtgaactggcgcaagcctatcatttagatctaacgcaacaaaatttatacgtagttactagttttttgaataagaaagagtatcaagaatggctggaaggaggagctgatagatgtttttaa

SEQ ID NO: 370 - protein, 440 aa
MLTKNFLAGIVGGLLCCFGILVVAPAVESASFWLYQFSSWLIEANLLPLVHVFLEPLKVLFFNNAINHGLLTPLGLEGASQTGQSILFLLETNPGPGVGVLVAFLLFGPVGQRKTAGGATMIQLIGGIHEIYFPFVLMDPRLFLAVIAGGMSGTLVFQIFNVGLSAPASPGSLVAILANAPTDARLAVFSGIFVSFLCSFAIASLLLKRQRGIEPVSMIKMKEEDQVETVTPNYQQILFVCDAGMGSSAMGASLLSRQLKAVNLEMPVTYQSVHQMKWQPKTLVVIQAELKQLAQKYVPEKDMVSVQNFLEIKSYYPQVLAKLTASSQEQSSLGSESTETNSTKQIQKLVFLYAENVRGSQTMGMELLRQQAAKQGVAIEVSKEPLETVFFTKETTYVVTRELAQAYHLDLTQQNLYVVTSFLNKKEYQEWLEGGADRCF

SEQ ID NO: 371 - DNA, 692 bp; double-stranded, linear
acgaggaattgaaccagtttcaatgataaagatgaaggaggaagaccaagtggaaacagtcacacctaactatcagcaaattttatttgtttgtgatgcaggaatgggctcaagtgccatgggggctagtttgctaagccgacaattaaaagctgtgaacttggagatgcctgtgacttaccagtccgttcatcagatgaagtggcagcctaagacattagtggtcattcaagcagaattgaaacagttagcacaaaagtacgtcccagaaaaggatatggtgagtgttcaaaattttttagaaattaaatcctattacccgcaagttttagccaaactgactgcttcttctcaagagcaatcttcacttggttcagagtctactgaaacgaactcgacaaaacaaatacagaagcttgtttttttatatgccgagaatgttcgaggatcgcaaacaatgggaatggaattattgcggcaacaagcggcgaaacaaggagtcgcgattgaagtatctaaagagccactggaaacagtcttttttaccaaggagacaacctacgtagtgactcgtgaactggcgcaagcctatcatttagatctaacgcaacaaaatttatacgtagttactagttttttgaataagaaagagtatcaagaatggctggaaggaggagctgatagatgttttt

SEQ ID NO: 372 - protein, 230 aa
RGIEPVSMIKMKEEDQVETVTPNYQQILFVCDAGMGSSAMGASLLSRQLKAVNLEMPVTYQSVHQMKWQPKTLVVIQAELKQLAQKYVPEKDMVSVQNFLEIKSYYPQVLAKLTASSQEQSSLGSESTETNSTKQIQKLVFLYAENVRGSQTMGMELLRQQAAKQGVAIEVSKEPLETVFFTKETTYVVTRELAQAYHLDLTQQNLYVVTSFLNKKEYQEWLEGGADRCF

SEQ ID NO: 373 - DNA, 762 bp; double-stranded, linear
taaatgaaaaagacaaaagtaatgacattgatggcaaccacaactttaggcgcactggcacttgtaccaatgagtgcattagcagtcgacggtggtgaataccaaacaaacggagcgattcaatttgcaccaaatacgaacccaacgaatccagttgatccgacgaatccagacccagataaaccaattacaccagttgatccaactgatccgacagggcctaagccagggacagcaggtccgttatccattgactatgcatctagcttatcttttggggaacaaacgattacctcaaaaaatatgacctactatgcagaaacacaaaaatacaaagataacgctggtgccgaccaagaaggcccaaactttgttcaagtctcagataatcgtgggactgagacaggttggacgctaaaagtaaaacaaaatggtcaattcaaaactgaagccaaccaagaactaacagcggccaaagtaactttaagcaacggacgcgtggtttcagcttcacaatctgcaaagccaacgacagcgccagctacgattgaattaaacccaactggggctgaatcagtggtcatggctgctggcgataaagaaggtgcgggtacgtacttaatgagctggggcgatagtgtagataccgctaaaacaagtatttcattagaagtacctggttcaaccacaaaatatgcgaaaaaatacacgacaacttttacttggactttgacagatacacctgctaacacaggaaactaa

SEQ ID NO: 374 - protein, 252 aa
MKKTKVMTLMATTTLGALALVPMSALAVDGGEYQTNGAIQFAPNTNPTNPVDPTNPDPDKPITPVDPTDPTGPKPGTAGPLSIDYASSLSFGEQTITSKNMTYYAETQKYKDNAGADQEGPNFVQVSDNRGTETGWTLKVKQNGQFKTEANQELTAAKVTLSNGRVVSASQSAKPTTAPATIELNPTGAESVVMAAGDKEGAGTYLMSWGDSVDTAKTSISLEVPGSTTKYAKKYTTTFTWTLTDTPANTGN

SEQ ID NO: 375 - DNA, 677 bp; double-stranded, linear
agtcgacggtggtgaataccaaacaaacggagcgattcaatttgcaccaaatacgaacccaacgaatccagttgatccgacgaatccagacccagataaaccaattacaccagttgatccaactgatccgacagggcctaagccagggacagcaggtccgttatccattgactatgcatctagcttatcttttggggaacaaacgattacctcaaaaaatatgacctactatgcagaaacacaaaaatacaaagataacgctggtgccgaccaagaaggcccaaactttgttcaagtctcagataatcgtgggactgagacaggttggacgctaaaagtaaaacaaaatggtcaattcaaaactgaagccaaccaagaactaacagcggccaaagtaactttaagcaacggacgcgtggtttcagcttcacaatctgcaaagccaacgacagcgccagctacgattgaattaaacccaactggggctgaatcagtggtcatggctgctggcgataaagaaggtgcgggtacgtacttaatgagctggggcgatagtgtagataccgctaaaacaagtatttcattagaagtacctggttcaaccacaaaatatgcgaaaaaatacacgacaacttttacttggactttgacagatacacctgctaacacaggaaact

SEQ ID NO: 376 - protein, 225 aa
VDGGEYQTNGAIQFAPNTNPTNPVDPTNPDPDKPITPVDPTDPTGPKPGTAGPLSIDYASSLSFGEQTITSKNMTYYAETQKYKDNAGADQEGPNFVQVSDNRGTETGWTLKVKQNGQFKTEANQELTAAKVTLSNGRVVSASQSAKPTTAPATIELNPTGAESVVMAAGDKEGAGTYLMSWGDSVDTAKTSISLEVPGSTTKYAKKYTTTFTWTLTDTPANTGN

SEQ ID NO: 377 - DNA, 1089 bp; double-stranded, linear
tgatgttgtagagggctgatgaaatgtttatcagtcttctttttattgaaaggagagatcatgaagaaattaggcaaggttttaattgttagttgttttatttttattcttccttttttattatttttaggtgtattttcttctagtgaaagcggagattcttcccagtttcagcccgctacaccacaggaaaaagtagcattagaagtttctaactacgtgacgtcacatggcggaacgttgcagtttgcttccgcttggattggcaatatggaacatgaaagtggattaaatcctgctagaattcaaagtgatttatcgtttaattcagcgatagcttttaatccttcgttaggcggttatggaattgggttaggacaatgggattcaggacgaagagttaatttattaaattttgcaaaaagtcaaaaaaaggaatggaaatcagtagctttacaaatggattttgcgtggaataaggatggttctgatagtgacttacttaaaagaatgtctaaatcaaaagatgtgaatacacttgcggtagatattttgaagctgtgggaacgagctggaacaaaagatgatcccgcagaacaagtaaaaagaaaggctagtgctaataattggtataaacgactttctacaggttccatgggcggaggttcagccaatgttggtggaggaaaaattgatgccttggaaaaagtgatggggcaaactattaatggtggtcaatgttatggcttatctgctttttttgttgaaaaacaaggaggtctacaaatgatgggtacggggcatatgtttgcgagtgaaattggtaatgattatccttggagttcaattggttggacagtcataaagaatccaaattattcagatattaaagcaggagatgtcattaattttggtcaaggtggtgtggctactagtatttatgggcatactggtgtagtggcaagtgttgaaggtaaaaacaagtttactacttatgagcaaaacgctgaacaaggtcaaattgttgctaagtattttcggacttggggattagattttccacatgtgaccagcatagtaaggaaatag

SEQ ID NO: 378 - protein, 356 aa
MKCLSVFFLLKGEIMKKLGKVLIVSCFIFILPFLLFLGVFSSSESGDSSQFQPATPQEKVALEVSNYVTSHGGTLQFASAWIGNMEHESGLNPARIQSDLSFNSAIAFNPSLGGYGIGLGQWDSGRRVNLLNFAKSQKKEWKSVALQMDFAWNKDGSDSDLLKRMSKSKDVNTLAVDILKLWERAGTKDDPAEQVKRKASANNWYKRLSTGSMGGGSANVGGGKIDALEKVMGQTINGGQCYGLSAFFVEKQGGLQMMGTGHMFASEIGNDYPWSSIGWTVIKNPNYSDIKAGDVINFGQGGVATSIYGHTGVVASVEGKNKFTTYEQNAEQGQIVAKYFRTWGLDFPHVTSIVRK

SEQ ID NO: 379 - DNA, 944 bp; double-stranded, linear
tagtgaaagcggagattcttcccagtttcagcccgctacaccacaggaaaaagtagcattagaagtttctaactacgtgacgtcacatggcggaacgttgcagtttgcttccgcttggattggcaatatggaacatgaaagtggattaaatcctgctagaattcaaagtgatttatcgtttaattcagcgatagcttttaatccttcgttaggcggttatggaattgggttaggacaatgggattcaggacgaagagttaatttattaaattttgcaaaaagtcaaaaaaaggaatggaaatcagtagctttacaaatggattttgcgtggaataaggatggttctgatagtgacttacttaaaagaatgtctaaatcaaaagatgtgaatacacttgcggtagatattttgaagctgtgggaacgagctggaacaaaagatgatcccgcagaacaagtaaaaagaaaggctagtgctaataattggtataaacgactttctacaggttccatgggcggaggttcagccaatgttggtggaggaaaaattgatgccttggaaaaagtgatggggcaaactattaatggtggtcaatgttatggcttatctgctttttttgttgaaaaacaaggaggtctacaaatgatgggtacggggcatatgtttgcgagtgaaattggtaatgattatccttggagttcaattggttggacagtcataaagaatccaaattattcagatattaaagcaggagatgtcattaattttggtcaaggtggtgtggctactagtatttatgggcatactggtgtagtggcaagtgttgaaggtaaaaacaagtttactacttatgagcaaaacgctgaacaaggtcaaattgttgctaagtattttcggacttggggattagattttccacatgtgaccagcatagtaaggaaat

SEQ ID NO: 380 - protein, 314 aa
SESGDSSQFQPATPQEKVALEVSNYVTSHGGTLQFASAWIGNMEHESGLNPARIQSDLSFNSAIAFNPSLGGYGIGLGQWDSGRRVNLLNFAKSQKKEWKSVALQMDFAWNKDGSDSDLLKRMSKSKDVNTLAVDILKLWERAGTKDDPAEQVKRKASANNWYKRLSTGSMGGGSANVGGGKIDALEKVMGQTINGGQCYGLSAFFVEKQGGLQMMGTGHMFASEIGNDYPWSSIGWTVIKNPNYSDIKAGDVINFGQGGVATSIYGHTGVVASVEGKNKFTTYEQNAEQGQIVAKYFRTWGLDFPHVTSIVRK

SEQ ID NO: 381 - DNA, 306 bp; double-stranded, linear
tanttatggcaatatggaaggagttttataatgaaaaagaaacaaaaatacgcagggtttacattattagaaatgttgattgtcttattgattatttccgtattgattttactttttgtccctaacttagcgaaacataaagaaacagttgataaaaaaggcaatgaagcaatcgtaaaaattgtagaatcacaaatcgagctctacacactagaaaaaaataagacgccttccttaaatgaattagtcaacgaaggctacattactaaagagcagttagataaatatacagcagaaaagcaatga

SEQ ID NO: 382 - protein, 91 aa
MKKKQKYAGFTLLEMLIVLLIISVLILLFVPNLAKHKETVDKKGNEAIVKIVESQIELYTLEKNKTPSLNELVNEGYITKEQLDKYTAEKQ

SEQ ID NO: 383 - DNA, 167 bp; double-stranded, linear
taaagaaacagttgataaaaaaggcaatgaagcaatcgtaaaaattgtagaatcacaaatcgagctctacacactagaaaaaaataagacgccttccttaaatgaattagtcaacgaaggctacattactaaagagcagttagataaatatacagcagaaaagcaat

SEQ ID NO: 384 - protein, 55 aa
KETVDKKGNEAIVKIVESQIELYTLEKNKTPSLNELVNEGYITKEQLDKYTAEKQ

SEQ ID NO: 385 - DNA, 306 bp; double-stranded, linear; identical to SEQ ID NO: 381

SEQ ID NO: 386 - protein, 91 aa; identical to SEQ ID NO: 382

SEQ ID NO: 387 - DNA, 167 bp; double-stranded, linear; identical to SEQ ID NO: 383

SEQ ID NO: 388 - protein, 55 aa; identical to SEQ ID NO: 384

SEQ ID NO: 389 - DNA, 1200 bp; double-stranded, linear
tgaggagatgaaacgaagaaaatgaagaagaaaacgataattatattgggggcagttgcggtaattgcggttgggggcatcgtaactgtgaatgcgttaaataaaaatgcacaacaagtagctgtcaagcaagcgcctaaagatgactggggaattgactattttgacgttcccgacttgcaacaaatttatattaacggtgtcatccaaccggaacaaatggaagcctttgcgcgtgatcaaaaaataacaaaggatccagagattaaggtgaaaaacggcgatgtcgtagatgcaggcacagaattatttacttatgaagatgaggcggtcacaaaagaaattgaggcacaacaaaatagcttagccaaattagaaacgaagcgggcgaatatctataataagtggaatcgggccattgataaatttaataaaactaaagaagaagaccgcacgatgtctggtgatgatttaaatgaacaatatcaaacagaagtcgatgcagtagatgaagagattaccttcaccaatgaaaccttagcggatttaggagcgaagcaatatatttccacaaaggctaatttcaaaggtcgtgtatcaattccagaagtaaaagatgccaattcaccgattttacggttaacttcagaagatctttatttagctggaaaagtgaatgaaaaggacttgactaaaattagtgttgggcaaaaagctaaactaacttctgtttccaacaatgtggttgtggatggctcaatttcttacatcgatgataatcctcctgaaggcaacagcgatgccgcgagtggcaatccagagggcggcacaacgatgtctagttatagcgtcaaaattgcgttggccaatttagacaaagtcaaaaatggctaccatatgcaagcaaccattgatttaggcgatttaggggcgattgagttaccgaaaaaagcgattcaaaaagagggtgaacaggcctacgttttagtgaatgattttggaaccatcattcgtcgtgatgtccaagtcgggcaagaaaatggcgacaaaatggcgattgaatctggcttagaatcagccgaccgagtggttatttcttcaaaaaaaccagtaaaagtcggtgatattgttgaatcagatgcagcgattgcttctgatgaatcagcaaccaacgaatcaatgacagatgcgtcgaaatag

SEQ ID NO: 390 - protein, 392 aa
MKKKTIIILGAVAVIAVGGIVTVNALNKNAQQVAVKQAPKDDWGIDYFDVPDLQQIYINGVIQPEQMEAFARDQKITKDPEIKVKNGDVVDAGTELFTYEDEAVTKEIEAQQNSLAKLETKRANIYNKWNRAIDKFNKTKEEDRTMSGDDLNEQYQTEVDAVDEEITFTNETLADLGAKQYISTKANFKGRVSIPEVKDANSPILRLTSEDLYLAGKVNEKDLTKISVGQKAKLTSVSNNVVVDGSISYIDDNPPEGNSDAASGNPEGGTTMSSYSVKIALANLDKVKNGYHMQATIDLGDLGAIELPKKAIQKEGEQAYVLVNDFGTIIRRDVQVGQENGDKMAIESGLESADRVVISSKKPVKVGDIVESDAAIASDESATNESMTDASK

SEQ ID NO: 391 - DNA, 1097 bp; double-stranded, linear
taaaaatgcacaacaagtagctgtcaagcaagcgcctaaagatgactggggaattgactattttgacgttcccgacttgcaacaaatttatattaacggtgtcatccaaccggaacaaatggaagcctttgcgcgtgatcaaaaaataacaaaggatccagagattaaggtgaaaaacggcgatgtcgtagatgcaggcacagaattatttacttatgaagatgaggcggtcacaaaagaaattgaggcacaacaaaatagcttagccaaattagaaacgaagcgggcgaatatctataataagtggaatcgggccattgataaatttaataaaactaaagaagaagaccgcacgatgtctggtgatgatttaaatgaacaatatcaaacagaagtcgatgcagtagatgaagagattaccttcaccaatgaaaccttagcggatttaggagcgaagcaatatatttccacaaaggctaatttcaaaggtcgtgtatcaattccagaagtaaaagatgccaattcaccgattttacggttaacttcagaagatctttatttagctggaaaagtgaatgaaaaggacttgactaaaattagtgttgggcaaaaagctaaactaacttctgtttccaacaatgtggttgtggatggctcaatttcttacatcgatgataatcctcctgaaggcaacagcgatgccgcgagtggcaatccagagggcggcacaacgatgtctagttatagcgtcaaaattgcgttggccaatttagacaaagtcaaaaatggctaccatatgcaagcaaccattgatttaggcgatttaggggcgattgagttaccgaaaaaagcgattcaaaaagagggtgaacaggcctacgttttagtgaatgattttggaaccatcattcgtcgtgatgtccaagtcgggcaagaaaatggcgacaaaatggcgattgaatctggcttagaatcagccgaccgagtggttatttcttcaaaaaaaccagtaaaagtcggtgatattgttgaatcagatgcagcgattgcttctgatgaatcagcaaccaacgaatcaatgacagatgcgtcgaaat

SEQ ID NO: 392 - protein, 365 aa
KNAQQVAVKQAPKDDWGIDYFDVPDLQQIYINGVIQPEQMEAFARDQKITKDPEIKVKNGDVVDAGTELFTYEDEAVTKEIEAQQNSLAKLETKRANIYNKWNRAIDKFNKTKEEDRTMSGDDLNEQYQTEVDAVDEEITFTNETLADLGAKQYISTKANFKGRVSIPEVKDANSPILRLTSEDLYLAGKVNEKDLTKISVGQKAKLTSVSNNVVVDGSISYIDDNPPEGNSDAASGNPEGGTTMSSYSVKIALANLDKVKNGYHMQATIDLGDLGAIELPKKAIQKEGEQAYVLVNDFGTIIRRDVQVGQENGDKMAIESGLESADRVVISSKKPVKVGDIVESDAAIASDESATNESMTDASK

SEQ ID NO: 393 - DNA, 3294 bp; double-stranded, linear; identical to SEQ ID NO: 357

SEQ ID NO: 394 - protein, 1074 aa; identical to SEQ ID NO: 358

SEQ ID NO: 395 - DNA, 1502 bp; double-stranded, linear
tttagatgaaaagaaccaagttgccgttaaacacctagcaattaacgagtatttctggcaagaaaccaaagcacctgaaggatatactttggatgaaacgaagtatcctgtatccatcaaaaaagttgataataacgaaaaaaatgccgtaattactcgagatgttacggcaaaagaacaagttattcgctttggctttgatttctttaaatttgctggatcggctgatggcactgccgaaactggatttaacgacttatcttttaaagtgtcgccattggaagggaccaangaaatcacaggtgctgaagataaagcgaccacagcttgtaacgagcaattaggttttgatggctatggtaagtttgaaaatcttccttatggggattatttacttgaagaaatagaggctccagaaggatttcaaaagattacaccactagaaatccgttctacatttaaggaaaacaaagacgactatgcgaagagtgagtatgtctttaccattaccgaagaaggacaaaaacaaccaattaagatggtgaccgttccttacgagaaactaactaacaacgagttttctgttagtctgaaccgtttgatgctttatgatttgcccgagaaagaagatagtttgacttctcttgcgacttggaaagacggaaataaaaaattgaatacccttgattttaccgagctagttgataaattgagatataacttgcatgaaatcaaagaagactggtatgtcgtagctcaagccattgatgtggaagccacaaaagctgcccaagaaaaagacgaaaaagccaaaccggtggtgattgccgaaacaaccgcaacgttggcgaacaaagagaaaactggaacttggaaaattctgcataaattaaccgctgaacaagttttggataaaagcatcgtcttgttcaattatgtgtatgaaaacaaggtagcctttgaagcaggcaatgagccagtagcgaaggatgctagcttgaacaatcaagcacaaaccgtcaattgtacgattgaacgccatgtttccatccaaacaaaagcccacctagaagatggttcgcaaacttttactcatggtgacgtgatggatatgtttgatgatgtgtcggttacccatgatgtactggatggctcaaaagaagctttcgaaacaattctgtatgctttactaccagatggtacgaacaaagaaatttggaaatctggcaaaattgagcatgaagtgaatgataaagaatttaccaaaaccgtacttgcggaaaaagtagataccggaaagtatccagaaggaactaagtttacttttacggaaatcaattacgaaaaagatggaaacgtgaatggaaaacacaatgaagatttgaaagaaaaatctcaaaccttaacaccaaaagaagtgccaaccataccgagtacgccaaaacaaccggaaacaccagctgttccaagtaattctcaagaatctagtcccacagtgaaga

SEQ ID NO: 396 - protein, 500 aa
LDEKNQVAVKHLAINEYFWQETKAPEGYTLDETKYPVSIKKVDNNEKNAVITRDVTAKEQVIRFGFDFFKFAGSADGTAETGFNDLSFKVSPLEGTXEITGAEDKATTACNEQLGFDGYGKFENLPYGDYLLEEIEAPEGFQKITPLEIRSTFKENKDDYAKSEYVFTITEEGQKQPIKMVTVPYEKLTNNEFSVSLNRLMLYDLPEKEDSLTSLATWKDGNKKLNTLDFTELVDKLRYNLHEIKEDWYVVAQAIDVEATKAAQEKDEKAKPVVIAETTATLANKEKTGTWKILHKLTAEQVLDKSIVLFNYVYENKVAFEAGNEPVAKDASLNNQAQTVNCTIERHVSIQTKAHLEDGSQTFTHGDVMDMFDDVSVTHDVLDGSKEAFETILYALLPDGTNKEIWKSGKIEHEVNDKEFTKTVLAEKVDTGKYPEGTKFTFTEINYEKDGNVNGKHNEDLKEKSQTLTPKEVPTIPSTPKQPETPAVPSNSQESSPTVK

SEQ ID NO: 397 - DNA, 1002 bp; double-stranded, linear
taagataggtttatcaaagaaaaggagcgatgctttatgaaaaagaaagtattaagttcgattactttagtaacattaagtacgttacttatagcaggttatgcaagtccagcatttgcagatcatgcagccaatccaaatagtgctacagcaaatttaggcaaacatcaaaacaatggccaaacaagaggcgacaaggcgactaagattttatctggcacggactggcaaggaacccgtgtttatgatgctgctggtaatgatttaacggcagaaaatgctaattttattggtttagcaaaatatgatggtgaaaccggtttttacgagtttttcgacaaaaatactggggaaacccgtggtgacgaaggaacattttttgtgacaggtgatggcacaaaacgaattttaatttcgcggacacaaaattatcaagccgtagtggatttaaccgaagtgagtaaagacnaatttacttacaagcgtttagggaaagataaactggggaatgatgttgaagtttacgtggaacacatcccttatcatgggaaaaaattagcttttacaaatggacgtgaagcattaaccaatcaaactggcaaaattgtgacaaataaatcaggggataaaattttaggaacaaccttgtggaatggcacaaaagtcgtagataaaaacggtaatgatgtgacagcggccaatcaaaatttcattagtttagcgaaatttgatccaaacacaagtaaatatgaatttttcaatttacaaacaggtgaaacccgcggcgactttgggtacttccaagtggtggacaataacaagattcgggcccatgtatctattggtacgaatcgttacggcgcggcgctagaattaacggaactaaacaatgatcgatttacgtatactcgaatgggtaaagataatgctggtaatgatattcaagtgttcgtggaacatgaaccttaccaaggcacatatcatccagcctttactttctaa

SEQ ID NO: 398 - protein, 321 aa
MKKKVLSSITLVTLSTLLIAGYASPAFADHAANPNSATANLGKHQNNGQTRGDKATKILSGTDWQGTRVYDAAGNDLTAENANFIGLAKYDGETGFYEFFDKNTGETRGDEGTFFVTGDGTKRILISRTQNYQAVVDLTEVSKDXFTYKRLGKDKLGNDVEVYVEHIPYHGKKLAFTNGREALTNQTGKIVTNKSGDKILGTTLWNGTKVVDKNGNDVTAANQNFISLAKFDPNTSKYEFFNLQTGETRGDFGYFQVVDNNKIRAHVSIGTNRYGAALELTELNNDRFTYTRMGKDNAGNDIQVFVEHEPYQGTYHPAFTF

SEQ ID NO: 399 - DNA, 869 bp; double-stranded, linear
tcatgcagccaatccaaatagtgctacagcaaatttaggcaaacatcaaaacaatggccaaacaagaggcgacaaggcgactaagattttatctggcacggactggcaaggaacccgtgtttatgatgctgctggtaatgatttaacggcagaaaatgctaattttattggtttagcaaaatatgatggtgaaaccggtttttacgagtttttcgacaaaaatactggggaaacccgtggtgacgaaggaacattttttgtgacaggtgatggcacaaaacgaattttaatttcgcggacacaaaattatcaagccgtagtggatttaaccgaagtgagtaaagacnaatttacttacaagcgtttagggaaagataaactggggaatgatgttgaagtttacgtggaacacatcccttatcatgggaaaaaattagcttttacaaatggacgtgaagcattaaccaatcaaactggcaaaattgtgacaaataaatcaggggataaaattttaggaacaaccttgtggaatggcacaaaagtcgtagataaaaacggtaatgatgtgacagcggccaatcaaaatttcattagtttagcgaaatttgatccaaacacaagtaaatatgaatttttcaatttacaaacaggtgaaacccgcggcgactttgggtacttccaagtggtggacaataacaagattcgggcccatgtatctattggtacgaatcgttacggcgcggcgctagaattaacggaactaaacaatgatcgatttacgtatactcgaatgggtaaagataatgctggtaatgatattcaagtgttcgtggaacatgaaccttaccaaggcacatatcatccagcct

SEQ ID NO: 400 - protein, 289 aa
HAANPNSATANLGKHQNNGQTRGDKATKILSGTDWQGTRVYDAAGNDLTAENANFIGLAKYDGETGFYEFFDKNTGETRGDEGTFFVTGDGTKRILISRTQNYQAVVDLTEVSKDXFTYKRLGKDKLGNDVEVYVEHIPYHGKKLAFTNGREALTNQTGKIVTNKSGDKILGTTLWNGTKVVDKNGNDVTAANQNFISLAKFDPNTSKYEFFNLQTGETRGDFGYFQVVDNNKIRAHVSIGTNRYGAALELTELNNDRFTYTRMGKDNAGNDIQVFVEHEPYQGTYHPA

SEQ ID NO: 401 - DNA, 4359 bp; double-stranded, linear
tgaaaggggattagtatgaagaaaaaaactttttcttttgtgatgttgagtatacttctcgcacaaaatttcgggtttgccgtaaatgcctatgctgtaacaacgacagaagcacaaacagagaccactgatacagcaaaaaaagaggcagagttatcgaactcaacaccatctttacctttagcaacaacgactacttcagaaatgaatcaaccaactgcaacaactgaatcgcaaaccacagaggcgagcacaacagcttccagtgatgctgctacaccatctgaacaacaaacaacggaggacaaggacacctcacttaatgaaaaagccctgccagatgttcaagcgccaattacagatgaactacttgacagtatgagtcttgcgccgattggtggaacagaatacagccaaacagaggttcaccgcgaattaaatacaacaccggtaaccgctacgttccaatttgctgttggaaacacaggttatgcacctggatcagtttatacagttcaattaccagaacatttaggttattcaactgtcagcggagaagtgacaggcattggcgcaacttgggcagtcgatgcggcgaccaaaacattaagtattacgtttaatcaacgagtttcagatacttcctttaaagtagaactaaaaagttatctaacaacagaggcggaaccattaatcaaaattgaaactccaggaaaaaataaaaaaacctactcgtttgatttatatgaacaagtggaaccaattcaatataacgaacgaaccagaacgacggggttagatggcgaaattttttataatttagaccggacgttaactggcaatcaaacattagaattattaacaacagagacgccaggcgctgtctttggaaaacaagataacttggaacctcaagttttcagttacgatgtcgacattaatggtcaaattttaccagaaacgcaaaccttgttaacacctggcaaagattatacattaagcgataattcactcgggcggattgctgtaactgttccaaacatgaatcaacaaaaagcctattccttatcgattaatcggacaatttatttagagagtgcttcggactataactacttatattcgcagcagtatccaacaacaaaaattgggtcaatttctttgaaaagtacgacaggaactaaacaaacaaccgattttactgctaagacgagtcaaacaagtaaagtaattgctgatcgtgaaatgcgtagtatgtcctatatcagttttcaaagcaaagggaaatattatgtaacaatttatggcacgttaacagaaacaaaagtgggtcaacaaatcgtattagagagtacaaacggtcaagaaattaagaatcctaaatttacggcgtatggtcctttatatgaaaatgtaaaattggaagactattttgatattaaaactgaaggtggcaagctcactttaacggccacaaaagatagctatttaagaataaatatttctgatttaacaatggattttgacaagaaggacattaatctatcattaagtacacctgtaattggtcctaataaagccattcaattagtatccgatcaatatattgaaccaattagtgttgttaatcctttgaatgctgaaactgcttggggtaattatgatcaaaatggtgcctattcatcaagaacaactgtctcagttatgggaagcaaagagaaaccgattcaaaatttagaaattaaagtaaagcatcctaattatctttcattacgagctacaaaagaaatttatttttattacaagttaggaacggattatacagtaacgccaacgtcagatggttcagttattaagttcactacgccaataaccaacgaaatccaaattccaattggttttaattatgtgccagatagtttgccaaaagataaaagtatcccagtcgatacgataccgataacaatgagtgctgaaggtttaactccagttgatacgacagtaactactaatagtaagcgtggttctgaacgaacacttcaaagtagtaaaaatcaattccttgtcaatgcacgaaatgattcttttgactcactaagcgtccgtacaaaaattccagctggcgccgatgttctttttgacatttatgatgtttcaaacgatcaggtagattcaatttatccacaatactgggaccgcggtcaatactttgataaaccaatgacgccaaacagccctggatatccaacgattacttttgacgaaaataccaatagttacacgtttgattttggaaaaaccaacaaacgttacattattgagtataaaaacgccaatggctggatcgacgtgccaactctttatataacagggacagcgaaagaaccacaatcgaataataatgaaggctctgcttcggtttctgttcaaaatgaagcgttagacattttgagtgcaacacaagcggcgaatccaacattaaaaaatgtaacaaaaacgacagtaacaacaaaaaatattgataataaaacacatcgtgtgaaaaatccaacgattgaattaacaccaaaaggcacaaccaatgctcaaatcgatttgaattctattaccgtgaaaggcgtgccagaagatgcttattcattagagaagactacaaacggtgcgaaagtcatttttaaagactatacattgacagaaaacattacgattgaatacaatacggtctctgcaaacgctggccaaatctatacagaaacaacaatcgactctgaaacattgaaccagatgtctgctagcaagaaaaaagtcaccactgcgccaatcacattgaaattctcagaaggtgatgcggaaggtattgtttatttagcaactgccacattctacacgcataacgtagaggatgaaaaccaagcaattgcgaaggtttcttttgaactaattgataatgtcacgcatacagcaaccgaatttacaacagatgaaaaaggtcaatactcctttgatgccatcatgacaggtgattatactttgcgagtaacgaatgtaccgcaggaatattccgtggatgaagagtatttgacaggaaaagccattaagctggtcaaaggagacaaccaactaaaaattccattaacgaaaacaattgatcacagtcgtttacaagtcaaagattcaacgatttatgtcggcgattcatggaaaccagaagagaactttgtttcagcaacagataaaacaggtcaagacgttcccttcgaaaaaatcactgtttcaggtcaagttgataacancaaagcaggcgtttatccaattatttacagtgacgaaggtaaagaagaaacagcctatgtgaccgtcaaacccgaccaatctaagttagaggtcaaagatacaacgatttatgttggtgattcgtggaaaccagaagataatttcgtttcagcgacagacaaaacaggtcaagacgtnccgtttgaaaaaattgatgttcagggaacagtgaatgttgataaaataggcgattatgaaattgtctataaaaatggcanaaaagaagcgaaagcaatcgttcatgtccgtgatgacagtcagttagaggttaaagatacaacgatttatgttggtgattcgtggaaaccagaagataatttcgtttcagcaacagacaaaacaggccaagacgttccgtttgaaaaaatcactgtttcaggtcaagttgatactagcaaagcaggcgtttatccaatcgtttacagttacgaaggtaaagaagaaacagctaatgtgactgtcaaacccgaccaatctaagttagaggttaaagatacaacgatttatgtgggcgataaatgggaaccagaagataatttcgtttcagcaacagacaaaacaggtcaagatgtcccgtttgaaaaaattgacgttcagggaacagtgaatgttgataaaataggcgattatgaaattgtctataaaaatggcacaaaagaagcgaaagcaatcgttcatgtccgtgatgacagtcagttagaggtcaaagatacaacaatttatgtgggtgataaatgggaagcagaagataacttcgtttccgcgacagacaaaacaggtcaagacgttccgtttgaaaaaattgatgttcagggaacagtgaatgttgataaaataggcgattatgaaattgtctataaaaatggcacaaaagaagcgaaagcaatcgttcatgtccgtgatgatagtcgtttacaagtcaaggatacaacgatttatgtcggcgattcntgganaccagaagngaactttgtttcagcnacagataaaacaggtcaagatgtcccattcgaaaaaatcactgtt

SEQ ID NO: 402 - protein, 1448 aa
MKKKTFSFVMLSILLAQNFGFAVNAYAVTTTEAQTETTDTAKKEAELSNSTPSLPLATTTTSEMNQPTATTESQTTEASTTASSDAATPSEQQTTEDKDTSLNEKALPDVQAPITDELLDSMSLAPIGGTEYSQTEVHRELNTTPVTATFQFAVGNTGYAPGSVYTVQLPEHLGYSTVSGEVTGIGATWAVDAATKTLSITFNQRVSDTSFKVELKSYLTTEAEPLIKIETPGKNKKTYSFDLYEQVEPIQYNERTRTTGLDGEIFYNLDRTLTGNQTLELLTTETPGAVFGKQDNLEPQVFSYDVDINGQILPETQTLLTPGKDYTLSDNSLGRIAVTVPNMNQQKAYSLSINRTIYLESASDYNYLYSQQYPTTKIGSISLKSTTGTKQTTDFTAKTSQTSKVIADREMRSMSYISFQSKGKYYVTIYGTLTETKVGQQIVLESTNGQEIKNPKFTAYGPLYENVKLEDYFDIKTEGGKLTLTATKDSYLRINISDLTMDFDKKDINLSLSTPVIGPNKAIQLVSDQYIEPISVVNPLNAETAWGNYDQNGAYSSRTTVSVMGSKEKPIQNLEIKVKHPNYLSLRATKEIYFYYKLGTDYTVTPTSDGSVIKFTTPITNEIQIPIGFNYVPDSLPKDKSIPVDTIPITMSAEGLTPVDTTVTTNSKRGSERTLQSSKNQFLVNARNDSFDSLSVRTKIPAGADVLFDIYDVSNDQVDSIYPQYWDRGQYFDKPMTPNSPGYPTITFDENTNSYTFDFGKTNKRYIIEYKNANGWIDVPTLYITGTAKEPQSNNNEGSASVSVQNEALDILSATQAANPTLKNVTKTTVTTKNIDNKTHRVKNPTIELTPKGTTNAQIDLNSITVKGVPEDAYSLEKTTNGAKVIFKDYTLTENITIEYNTVSANAGQIYTETTIDSETLNQMSASKKKVTTAPITLKFSEGDAEGIVYLATATFYTHNVEDENQAIAKVSFELIDNVTHTATEFTTDEKGQYSFDAIMTGDYTLRVTNVPQEYSVDEEYLTGKAIKLVKGDNQLKIPLTKTIDHSRLQVKDSTIYVGDSWKPEENFVSATDKTGQDVPFEKITVSGQVDNXKAGVYPIIYSDEGKEETAYVTVKPDQSKLEVKDTTIYVGDSWKPEDNFVSATDKTGQDVPFEKIDVQGTVNVDKIGDYEIVYKNGXKEAKAIVHVRDDSQLEVKDTTIYVGDSWKPEDNFVSATDKTGQDVPFEKITVSGQVDTSKAGVYPIVYSYEGKEETANVTVKPDQSKLEVKDTTIYVGDKWEPEDNFVSATDKTGQDVPFEKIDVQGTVNVDKIGDYEIVYKNGTKEAKAIVHVRDDSQLEVKDTTIYVGDKWEAEDNFVSATDKTGQDVPFEKIDVQGTVNVDKIGDYEIVYKNGTKEAKAIVHVRDDSRLQVKDTTIYVGDSWXPEXNFVSATDKTGQDVPFEKITV

SEQ ID NO: 403 - DNA, 4249 bp; double-stranded, linear
tgtaacaacgacagaagcacaaacagagaccactgatacagcaaaaaaagaggcagagttatcgaactcaacaccatctttacctttagcaacaacgactacttcagaaatgaatcaaccaactgcaacaactgaatcgcaaaccacagaggcgagcacaacagcttccagtgatgctgctacaccatctgaacaacaaacaacggaggacaaggacacctcacttaatgaaaaagccctgccagatgttcaagcgccaattacagatgaactacttgacagtatgagtcttgcgccgattggtggaacagaatacagccaaacagaggttcaccgcgaattaaatacaacaccggtaaccgctacgttccaatttgctgttggaaacacaggttatgcacctggatcagtttatacagttcaattaccagaacatttaggttattcaactgtcagcggagaagtgacaggcattggcgcaacttgggcagtcgatgcggcgaccaaaacattaagtattacgtttaatcaacgagtttcagatacttcctttaaagtagaactaaaaagttatctaacaacagaggcggaaccattaatcaaaattgaaactccaggaaaaaataaaaaaacctactcgtttgatttatatgaacaagtggaaccaattcaatataacgaacgaaccagaacgacggggttagatggcgaaattttttataatttagaccggacgttaactggcaatcaaacattagaattattaacaacagagacgccaggcgctgtctttggaaaacaagataacttggaacctcaagttttcagttacgatgtcgacattaatggtcaaattttaccagaaacgcaaaccttgttaacacctggcaaagattatacattaagcgataattcactcgggcggattgctgtaactgttccaaacatgaatcaacaaaaagcctattccttatcgattaatcggacaatttatttagagagtgcttcggactataactacttatattcgcagcagtatccaacaacaaaaattgggtcaatttctttgaaaagtacgacaggaactaaacaaacaaccgattttactgctaagacgagtcaaacaagtaaagtaattgctgatcgtgaaatgcgtagtatgtcctatatcagttttcaaagcaaagggaaatattatgtaacaatttatggcacgttaacagaaacaaaagtgggtcaacaaatcgtattagagagtacaaacggtcaagaaattaagaatcctaaatttacggcgtatggtcctttatatgaaaatgtaaaattggaagactattttgatattaaaactgaaggtggcaagctcactttaacggccacaaaagatagctatttaagaataaatatttctgatttaacaatggattttgacaagaaggacattaatctatcattaagtacacctgtaattggtcctaataaagccattcaattagtatccgatcaatatattgaaccaattagtgttgttaatcctttgaatgctgaaactgcttggggtaattatgatcaaaatggtgcctattcatcaagaacaactgtctcagttatgggaagcaaagagaaaccgattcaaaatttagaaattaaagtaaagcatcctaattatctttcattacgagctacaaaagaaatttatttttattacaagttaggaacggattatacagtaacgccaacgtcagatggttcagttattaagttcactacgccaataaccaacgaaatccaaattccaattggttttaattatgtgccagatagtttgccaaaagataaaagtatcccagtcgatacgataccgataacaatgagtgctgaaggtttaactccagttgatacgacagtaactactaatagtaagcgtggttctgaacgaacacttcaaagtagtaaaaatcaattccttgtcaatgcacgaaatgattcttttgactcactaagcgtccgtacaaaaattccagctggcgccgatgttctttttgacatttatgatgtttcaaacgatcaggtagattcaatttatccacaatactgggaccgcggtcaatactttgataaaccaatgacgccaaacagccctggatatccaacgattacttttgacgaaaataccaatagttacacgtttgattttggaaaaaccaacaaacgttacattattgagtataaaaacgccaatggctggatcgacgtgccaactctttatataacagggacagcgaaagaaccacaatcgaataataatgaaggctctgcttcggtttctgttcaaaatgaagcgttagacattttgagtgcaacacaagcggcgaatccaacattaaaaaatgtaacaaaaacgacagtaacaacaaaaaatattgataataaaacacatcgtgtgaaaaatccaacgattgaattaacaccaaaaggcacaaccaatgctcaaatcgatttgaattctattaccgtgaaaggcgtgccagaagatgcttattcattagagaagactacaaacggtgcgaaagtcatttttaaagactatacattgacagaaaacattacgattgaatacaatacggtctctgcaaacgctggccaaatctatacagaaacaacaatcgactctgaaacattgaaccagatgtctgctagcaagaaaaaagtcaccactgcgccaatcacattgaaattctcagaaggtgatgcggaaggtattgtttatttagcaactgccacattctacacgcataacgtagaggatgaaaaccaagcaattgcgaaggtttcttttgaactaattgataatgtcacgcatacagcaaccgaatttacaacagatgaaaaaggtcaatactcctttgatgccatcatgacaggtgattatactttgcgagtaacgaatgtaccgcaggaatattccgtggatgaagagtatttgacaggaaaagccattaagctggtcaaaggagacaaccaactaaaaattccattaacgaaaacaattgatcacagtcgtttacaagtcaaagattcaacgatttatgtcggcgattcatggaaaccagaagagaactttgtttcagcaacagataaaacaggtcaagacgttcccttcgaaaaaatcactgtttcaggtcaagttgataacancaaagcaggcgtttatccaattatttacagtgacgaaggtaaagaagaaacagcctatgtgaccgtcaaacccgaccaatctaagttagaggtcaaagatacaacgatttatgttggtgattcgtggaaaccagaagataatttcgtttcagcgacagacaaaacaggtcaagacgtnccgtttgaaaaaattgatgttcagggaacagtgaatgttgataaaataggcgattatgaaattgtctataaaaatggcanaaaagaagcgaaagcaatcgttcatgtccgtgatgacagtcagttagaggttaaagatacaacgatttatgttggtgattcgtggaaaccagaagataatttcgtttcagcaacagacaaaacaggccaagacgttccgtttgaaaaaatcactgtttcaggtcaagttgatactagcaaagcaggcgtttatccaatcgtttacagttacgaaggtaaagaagaaacagctaatgtgactgtcaaacccgaccaatctaagttagaggttaaagatacaacgatttatgtgggcgataaatgggaaccagaagataatttcgtttcagcaacagacaaaacaggtcaagatgtcccgtttgaaaaaattgacgttcagggaacagtgaatgttgataaaataggcgattatgaaattgtctataaaaatggcacaaaagaagcgaaagcaatcgttcatgtccgtgatgacagtcagttagaggtcaaagatacaacaatttatgtgggtgataaatgggaagcagaagataacttcgtttccgcgacagacaaaacaggtcaagacgttccgtttgaaaaaattgatgttcagggaacagtgaatgttgataaaataggcgattatgaaattgtctataaaaatggcacaaaagaagcgaaagcaatcgttcatgtccgtgatgatagtcgtttacaagtcaaggatacaacgatttatgtcggcgattcntgganaccagaagngaactttgtttcagcnacagataaaacaggtcaagatgtcccattc

SEQ ID NO: 404 - protein, 1416 aa
VTTTEAQTETTDTAKKEAELSNSTPSLPLATTTTSEMNQPTATTESQTTEASTTASSDAATPSEQQTTEDKDTSLNEKALPDVQAPITDELLDSMSLAPIGGTEYSQTEVHRELNTTPVTATFQFAVGNTGYAPGSVYTVQLPEHLGYSTVSGEVTGIGATWAVDAATKTLSITFNQRVSDTSFKVELKSYLTTEAEPLIKIETPGKNKKTYSFDLYEQVEPIQYNERTRTTGLDGEIFYNLDRTLTGNQTLELLTTETPGAVFGKQDNLEPQVFSYDVDINGQILPETQTLLTPGKDYTLSDNSLGRIAVTVPNMNQQKAYSLSINRTIYLESASDYNYLYSQQYPTTKIGSISLKSTTGTKQTTDFTAKTSQTSKVIADREMRSMSYISFQSKGKYYVTIYGTLTETKVGQQIVLESTNGQEIKNPKFTAYGPLYENVKLEDYFDIKTEGGKLTLTATKDSYLRINISDLTMDFDKKDINLSLSTPVIGPNKAIQLVSDQYIEPISVVNPLNAETAWGNYDQNGAYSSRTTVSVMGSKEKPIQNLEIKVKHPNYLSLRATKEIYFYYKLGTDYTVTPTSDGSVIKFTTPITNEIQIPIGFNYVPDSLPKDKSIPVDTIPITMSAEGLTPVDTTVTTNSKRGSERTLQSSKNQFLVNARNDSFDSLSVRTKIPAGADVLFDIYDVSNDQVDSIYPQYWDRGQYFDKPMTPNSPGYPTITFDENTNSYTFDFGKTNKRYIIEYKNANGWIDVPTLYITGTAKEPQSNNNEGSASVSVQNEALDILSATQAANPTLKNVTKTTVTTKNIDNKTHRVKNPTIELTPKGTTNAQIDLNSITVKGVPEDAYSLEKTTNGAKVIFKDYTLTENITIEYNTVSANAGQIYTETTIDSETLNQMSASKKKVTTAPITLKFSEGDAEGIVYLATATFYTHNVEDENQAIAKVSFELIDNVTHTATEFTTDEKGQYSFDAIMTGDYTLRVTNVPQEYSVDEEYLTGKAIKLVKGDNQLKIPLTKTIDHSRLQVKDSTIYVGDSWKPEENFVSATDKTGQDVPFEKITVSGQVDNXKAGVYPIIYSDEGKEETAYVTVKPDQSKLEVKDTTIYVGDSWKPEDNFVSATDKTGQDVPFEKIDVQGTVNVDKIGDYEIVYKNGXKEAKAIVHVRDDSQLEVKDTTIYVGDSWKPEDNFVSATDKTGQDVPFEKITVSGQVDTSKAGVYPIVYSYEGKEETANVTVKPDQSKLEVKDTTIYVGDKWEPEDNFVSATDKTGQDVPFEKIDVQGTVNVDKIGDYEIVYKNGTKEAKAIVHVRDDSQLEVKDTTIYVGDKWEAEDNFVSATDKTGQDVPFEKIDVQGTVNVDKIGDYEIVYKNGTKEAKAIVHVRDDSRLQVKDTTIYVGDSWXPEXNFVSATDKTGQDVPF

SEQ ID NO: 405 - DNA, 804 bp; double-stranded, linear
taaatgaaaaaaacagtcgtctactccttgttattcggaacaatgttgcttggcgccactgttcctgctgaagcggcgacggtcgtttttgatagcgaacagtcgattgtttttaccccaagcacagatgggacggatccagtaaatccagaaaatcccgatccagaaaaaccagttcgaccagtcgatccaacgaatcctgatggacctaatccaggtacccctggtccactttccatcgattatgcctcaagtttggattttgggagtaatgagatatcgaataaggatcaaacgtattttgccagagcgcaaacctatagaaatccagatggttcagcaagtgaattggcaactgctaattatgtacaagtaagtgatttacggggaaccaatgctggctgggttttaaaagtgaaacaaaatggtcaatttcgtaatgcagaaacattacacaaagaattaacaggcgccaccgtcgcctttactgagcccagtgttcgctcaaatgcgacggacgtattgccgccaactgctaccgcaaacattcaattagatgctgcgggcgcagaaactgttgtcatgcaagccccagaaaagaccggcgccggaacgtggatcacgctgtgggggcaagcagaaaaagtgaccgaaaaaaatcaacaaggacagcaagtaaatgccacaatcacacgggcaatctcactaactgttcctgggaaaacccctaaggatgcagtacaatataaaacaacattgacttggctactttcagatgtaccagtaaataatggagggaaataa

SEQ ID NO: 406 - protein, 266 aa
MKKTVVYSLLFGTMLLGATVPAEAATVVFDSEQSIVFTPSTDGTDPVNPENPDPEKPVRPVDPTNPDGPNPGTPGPLSIDYASSLDFGSNEISNKDQTYFARAQTYRNPDGSASELATANYVQVSDLRGTNAGWVLKVKQNGQFRNAETLHKELTGATVAFTEPSVRSNATDVLPPTATANIQLDAAGAETVVMQAPEKTGAGTWITLWGQAEKVTEKNQQGQQVNATITRAISLTVPGKTPKDAVQYKTTLTWLLSDVPVNNGGK

SEQ ID NO: 407 - DNA, 668 bp; double-stranded, linear
ggcgacggtcgtttttgatagcgaacagtcgattgtttttaccccaagcacagatgggacggatccagtaaatccagaaaatcccgatccagaaaaaccagttcgaccagtcgatccaacgaatcctgatggacctaatccaggtacccctggtccactttccatcgattatgcctcaagtttggattttgggagtaatgagatatcgaataaggatcaaacgtattttgccagagcgcaaacctatagaaatccagatggttcagcaagtgaattggcaactgctaattatgtacaagtaagtgatttacggggaaccaatgctggctgggttttaaaagtgaaacaaaatggtcaatttcgtaatgcagaaacattacacaaagaattaacaggcgccaccgtcgcctttactgagcccagtgttcgctcaaatgcgacggacgtattgccgccaactgctaccgcaaacattcaattagatgctgcgggcgcagaaactgttgtcatgcaagccccagaaaagaccggcgccggaacgtggatcacgctgtgggggcaagcagaaaaagtgaccgaaaaaaatcaacaaggacagcaagtaaatgccacaatcacacgggcaatctcactaactgttcctgggaaaacccctaaggatgcagtac

SEQ ID NO: 408 - protein, 222 aa
ATVVFDSEQSIVFTPSTDGTDPVNPENPDPEKPVRPVDPTNPDGPNPGTPGPLSIDYASSLDFGSNEISNKDQTYFARAQTYRNPDGSASELATANYVQVSDLRGTNAGWVLKVKQNGQFRNAETLHKELTGATVAFTEPSVRSNATDVLPPTATANIQLDAAGAETVVMQAPEKTGAGTWITLWGQAEKVTEKNQQGQQVNATITRAISLTVPGKTPKDAV

SEQ ID NO: 409 - DNA, 1053 bp; double-stranded, linear
tagtcgtttatgaagaaaaaaatcgttggtacaattacgttgttggctttaagtgcgttattagttggtggagcaggaggggctttgacggcagaagcatacgttcctcaaagcgtagacaatcccaataatttaggggatttacctgagtatttacgttcagttggtattagacaagatgaaggattatcagaaaaagattgggctggaacacgcgtttatgatcgaaatgggaatgacttaacagatgaaaatcaaaacctattacatgcaatcaaatttgatgcaaccactagtttctatgaattttttgataaagagactggagaatcaacaggagatgaaggaaccttctttatgaccgctggtattacagatgtttcccgtcttgtaattatttctgaaaccaaaaattatcaaggtgtatacccacttagaactttataccaagatacttttacgtatagacagatggggaaagataaaaacggaaatgatattgaagttttcgtagaaaacaaagcaacctcaggaccagtttatggtcgtccgcagccataccccaataatcgtcccagaacactagaattcacgaatggacgccgtgccatgacagaacaaacaggccagattgatgtaaatcgacaaggggatgaaattattggtaaaacttcctttgatgggacaccgcaacttctttggaatggcacaaaagtagtggataaagatggcaatgacgtaacttcggccaaccaaaactttatcagcttagcgaaatttgaccaagatagcagcaaatatgaatttttcaatttacaaactggtgaaactcgtggcgactatggctactttaaagtaggaaatcaaaataaattccgtgcccatgtttccattggaaccaatcgctatggcgctgtcttagagttaacagaattgaatgataatcgttttacgtacacacgaatgggtaaagataacgaaggaaacgatatccaagtctatgtggaacatgaaccataccaaggaacttttaatcctgaatttaccttttaa

SEQ ID NO: 410 - protein, 347 aa
MKKKIVGTITLLALSALLVGGAGGALTAEAYVPQSVDNPNNLGDLPEYLRSVGIRQDEGLSEKDWAGTRVYDRNGNDLTDENQNLLHAIKFDATTSFYEFFDKETGESTGDEGTFFMTAGITDVSRLVIISETKNYQGVYPLRTLYQDTFTYRQMGKDKNGNDIEVFVENKATSGPVYGRPQPYPNNRPRTLEFTNGRRAMTEQTGQIDVNRQGDEIIGKTSFDGTPQLLWNGTKVVDKDGNDVTSANQNFISLAKFDQDSSKYEFFNLQTGETRGDYGYFKVGNQNKFRAHVSIGTNRYGAVLELTELNDNRFTYTRMGKDNEGNDIQVYVEHEPYQGTFNPEFTF

SEQ ID NO: 411 - DNA, 932 bp; double-stranded, linear
atacgttcctcaaagcgtagacaatcccaataatttaggggatttacctgagtatttacgttcagttggtattagacaagatgaaggattatcagaaaaagattgggctggaacacgcgtttatgatcgaaatgggaatgacttaacagatgaaaatcaaaacctattacatgcaatcaaatttgatgcaaccactagtttctatgaattttttgataaagagactggagaatcaacaggagatgaaggaaccttctttatgaccgctggtattacagatgtttcccgtcttgtaattatttctgaaaccaaaaattatcaaggtgtatacccacttagaactttataccaagatacttttacgtatagacagatggggaaagataaaaacggaaatgatattgaagttttcgtagaaaacaaagcaacctcaggaccagtttatggtcgtccgcagccataccccaataatcgtcccagaacactagaattcacgaatggacgccgtgccatgacagaacaaacaggccagattgatgtaaatcgacaaggggatgaaattattggtaaaacttcctttgatgggacaccgcaacttctttggaatggcacaaaagtagtggataaagatggcaatgacgtaacttcggccaaccaaaactttatcagcttagcgaaatttgaccaagatagcagcaaatatgaatttttcaatttacaaactggtgaaactcgtggcgactatggctactttaaagtaggaaatcaaaataaattccgtgcccatgtttccattggaaccaatcgctatggcgctgtcttagagttaacagaattgaatgataatcgttttacgtacacacgaatgggtaaagataacgaaggaaacgatatccaagtctatgtggaacatgaaccataccaaggaactt

SEQ ID NO: 412 - protein, 310 aa
YVPQSVDNPNNLGDLPEYLRSVGIRQDEGLSEKDWAGTRVYDRNGNDLTDENQNLLHAIKFDATTSFYEFFDKETGESTGDEGTFFMTAGITDVSRLVIISETKNYQGVYPLRTLYQDTFTYRQMGKDKNGNDIEVFVENKATSGPVYGRPQPYPNNRPRTLEFTNGRRAMTEQTGQIDVNRQGDEIIGKTSFDGTPQLLWNGTKVVDKDGNDVTSANQNFISLAKFDQDSSKYEFFNLQTGETRGDYGYFKVGNQNKFRAHVSIGTNRYGAVLELTELNDNRFTYTRMGKDNEGNDIQVYVEHEPYQGT

SEQ ID NO: 413 - DNA, 3078 bp; double-stranded, linear
taaaaaacggcactcaatatgtcaaaatttgaaatttcaagctgtgtgttctttggtaaaatanatanaaaaatgctagttatcagtatcgataataacaggatactgattaagaaaggactttatagagactatagattgaatttttacatagaaagaaggagcaagatgaagcgagtaaattggaaaagatggctagttgttgggttaagttgttctttgttcatggattcagtggttggtgtgactgtgttagcggaaacgattactggggcgacggagcaaggagtagcaacatctcagtcgagtgacgaagcgagccagacgacgcaaacaaccgaagagtcacaggcaacggtcgctagtgaagcgaaaacagtaccgccacaggaaacggcaagaattgcttctcgagcgattggttattcttctgtggaagggcgcgagattccctttttctttgtggaggaagacgggacgttgtttgatcccgaccgaattacgatggcggtcaatctttccacgttttcgttttatgaagagaaattacaacgaaccccccttgagcccaccactgtgaatggcggaaagttactgtctattccaacgtcaccagcttttaaatatgatacaaataaccagaatccaagtaatatttatggcgtttctgaagtgtcgtttactattcctaaggagtatcaaagcctggacattcgaccaagtacgttttatacaggagacactacgcaatatccagtgccaacggtttttgcgaacgttgggggcaaagtgacgaactatgtgggcgccaatgcggagacggaattagagttaaccaatgaaaaaatgcccaataagctgacgtttggtcctaaaaagacgtttaaatatacggtagctacggcaccaggaggcgttacgtatgcgctgacctatttttatggagatgtcggcggtccaactagttcgcaccaaagacgaggaacagcgggtcctgtgtattattatttaacaaagcggcgtgtcacggaaaaatttgagaatcccgcaggcggggcgattcctgcgccagaaggttatacgcaggataagaaaaccattgtaacaggggaggattttacttttacccaagaaggcaccttgcctgaacgttacacaggcagtgatgggaagacgtatttatttaaaggttggtacaaagggaatgcgaaacctagcacgttggaaaccaccaaaacgcctagttatgcggtgacctatgatgacaatgacgatttgcatgtggtctatgaagaagcagtgatgaaaacctatacgttgccagcgagagaagctttgttcggctatgttgatgagcaaggaaacttgattaatcccgccaagtttaagctaagtgcgaccatgggtgaaagtgacggagccacaggggaaatgacgacttttcccacaattgatggaatcgatatgccagcaagtcaattaaagaaattagccatcccgcaaaaagtctacacacgcccagacgatgggacaatcgtaacttatggcccgcaagaagtgagtgttgaaattcctaagtattaccagacgatttcgatttcaccaactactgcgtatacaggggataaaaccaagtatccagtaccaaatgaagtgcgccgtggcatcgaaaaccccgacaacattgttagtagtttagtgggaancnctgcgtataacttgacccaaaaaagtgccacacgctatactgcccgccgttcttactggangtggggccccacgaagacactttactcaatgagtatctattcaggaactgctgggggcaactataatttatcgacccctgatggcaccatttattattacttagaaaatcggcgggtcactgaacattttgtagacgaaagtggcgcaaaaatcacgccaccaactggctttacacaaggaaatcagctagtggtggacagtgaaaactatgtctacactgtcgcaaaagctttgccgaagatctaccaagctggtgaaaaaacctatatcttccaaggctggtttaaaggcaaaaccaagccagcaacattaaagacgacaacgaccccaagttttacaccaacttttaatgatgaggacgacatgaccgctgtgtaccaagaagcgattcccaccgcggaactaacgttaacaggtgccgttgacataatcgaaaatggcgccacaatggattactgggaggcgctactgaagaacacaggcgaagcgccgttaaccaccattaaaatcaagccaacggcaacttgggcggctggcatcggcgcacccaacacgatatttgtacaaggaacgggtcaaaacaccaaagcttttcctgtcaccaaagaacaatggacgaccggtgcaggagtgtccatcacgttggatcagcctttaccagctggcggtcaattaaaaatgaacttattaggaaccgccgttacaggaaatcctggtcaagttttaaccgctgatgttgaagtaacgggcaactttggcagtttaactgccaaagatacggtccgtattaaagacttagatcaagaaattacgagtcctgacggcgacggctttattagtaccccgacatttgattttggtaaactagcaatttcaggaagtaagcaacaatatggtttgaagaaggccgcagattactacggcaatggcactcgcaacccttatttacgcctgaatactagccaagccaattggagtttaacggcccagctatcgcaaccaaaatcagccacagacagcttgccaacaacgacccgcttgttgctaggaacggccgctgctgccagctttaccgattacaaccaaccaacagaaaccaggacaccacttggcaagaccagcaccgtgactttaaccgccgacaataccgcaacagcggtggtcgcaaaccaacagttcacaggcagtgacgtctatcagttggacttcacgtttgctaacatcaaactagaagtgccagccaaccaaggtatggctggccaacaataccaagccgccgtcacgtggaatttagtgactggcccctaa

SEQ ID NO: 414 - protein, 969 aa
MKRVNWKRWLVVGLSCSLFMDSVVGVTVLAETITGATEQGVATSQSSDEASQTTQTTEESQATVASEAKTVPPQETARIASRAIGYSSVEGREIPFFFVEEDGTLFDPDRITMAVNLSTFSFYEEKLQRTPLEPTTVNGGKLLSIPTSPAFKYDTNNQNPSNIYGVSEVSFTIPKEYQSLDIRPSTFYTGDTTQYPVPTVFANVGGKVTNYVGANAETELELTNEKMPNKLTFGPKKTFKYTVATAPGGVTYALTYFYGDVGGPTSSHQRRGTAGPVYYYLTKRRVTEKFENPAGGAIPAPEGYTQDKKTIVTGEDFTFTQEGTLPERYTGSDGKTYLFKGWYKGNAKPSTLETTKTPSYAVTYDDNDDLHVVYEEAVMKTYTLPAREALFGYVDEQGNLINPAKFKLSATMGESDGATGEMTTFPTIDGIDMPASQLKKLAIPQKVYTRPDDGTIVTYGPQEVSVEIPKYYQTISISPTTAYTGDKTKYPVPNEVRRGIENPDNIVSSLVGXXAYNLTQKSATRYTARRSYWXWGPTKTLYSMSIYSGTAGGNYNLSTPDGTIYYYLENRRVTEHFVDESGAKITPPTGFTQGNQLVVDSENYVYTVAKALPKIYQAGEKTYIFQGWFKGKTKPATLKTTTTPSFTPTFNDEDDMTAVYQEAIPTAELTLTGAVDIIENGATMDYWEALLKNTGEAPLTTIKIKPTATWAAGIGAPNTIFVQGTGQNTKAFPVTKEQWTTGAGVSITLDQPLPAGGQLKMNLLGTAVTGNPGQVLTADVEVTGNFGSLTAKDTVRIKDLDQEITSPDGDGFISTPTFDFGKLAISGSKQQYGLKKAADYYGNGTRNPYLRLNTSQANWSLTAQLSQPKSATDSLPTTTRLLLGTAAAASFTDYNQPTETRTPLGKTSTVTLTADNTATAVVANQQFTGSDVYQLDFTFANIKLEVPANQGMAGQQYQAAVTWNLVTGP

SEQ ID NO: 415 - DNA, 2798 bp; double-stranded, linear
ggagcaaggagtagcaacatctcagtcgagtgacgaagcgagccagacgacgcaaacaaccgaagagtcacaggcaacggtcgctagtgaagcgaaaacagtaccgccacaggaaacggcaagaattgcttctcgagcgattggttattcttctgtggaagggcgcgagattccctttttctttgtggaggaagacgggacgttgtttgatcccgaccgaattacgatggcggtcaatctttccacgttttcgttttatgaagagaaattacaacgaaccccccttgagcccaccactgtgaatggcggaaagttactgtctattccaacgtcaccagcttttaaatatgatacaaataaccagaatccaagtaatatttatggcgtttctgaagtgtcgtttactattcctaaggagtatcaaagcctggacattcgaccaagtacgttttatacaggagacactacgcaatatccagtgccaacggtttttgcgaacgttgggggcaaagtgacgaactatgtgggcgccaatgcggagacggaattagagttaaccaatgaaaaaatgcccaataagctgacgtttggtcctaaaaagacgtttaaatatacggtagctacggcaccaggaggcgttacgtatgcgctgacctatttttatggagatgtcggcggtccaactagttcgcaccaaagacgaggaacagcgggtcctgtgtattattatttaacaaagcggcgtgtcacggaaaaatttgagaatcccgcaggcggggcgattcctgcgccagaaggttatacgcaggataagaaaaccattgtaacaggggaggattttacttttacccaagaaggcaccttgcctgaacgttacacaggcagtgatgggaagacgtatttatttaaaggttggtacaaagggaatgcgaaacctagcacgttggaaaccaccaaaacgcctagttatgcggtgacctatgatgacaatgacgatttgcatgtggtctatgaagaagcagtgatgaaaacctatacgttgccagcgagagaagctttgttcggctatgttgatgagcaaggaaacttgattaatcccgccaagtttaagctaagtgcgaccatgggtgaaagtgacggagccacaggggaaatgacgacttttcccacaattgatggaatcgatatgccagcaagtcaattaaagaaattagccatcccgcaaaaagtctacacacgcccagacgatgggacaatcgtaacttatggcccgcaagaagtgagtgttgaaattcctaagtattaccagacgatttcgatttcaccaactactgcgtatacaggggataaaaccaagtatccagtaccaaatgaagtgcgccgtggcatcgaaaaccccgacaacattgttagtagtttagtgggaancnctgcgtataacttgacccaaaaaagtgccacacgctatactgcccgccgttcttactggangtggggccccacgaagacactttactcaatgagtatctattcaggaactgctgggggcaactataatttatcgacccctgatggcaccatttattattacttagaaaatcggcgggtcactgaacattttgtagacgaaagtggcgcaaaaatcacgccaccaactggctttacacaaggaaatcagctagtggtggacagtgaaaactatgtctacactgtcgcaaaagctttgccgaagatctaccaagctggtgaaaaaacctatatcttccaaggctggtttaaaggcaaaaccaagccagcaacattaaagacgacaacgaccccaagttttacaccaacttttaatgatgaggacgacatgaccgctgtgtaccaagaagcgattcccaccgcggaactaacgttaacaggtgccgttgacataatcgaaaatggcgccacaatggattactgggaggcgctactgaagaacacaggcgaagcgccgttaaccaccattaaaatcaagccaacggcaacttgggcggctggcatcggcgcacccaacacgatatttgtacaaggaacgggtcaaaacaccaaagcttttcctgtcaccaaagaacaatggacgaccggtgcaggagtgtccatcacgttggatcagcctttaccagctggcggtcaattaaaaatgaacttattaggaaccgccgttacaggaaatcctggtcaagttttaaccgctgatgttgaagtaacgggcaactttggcagtttaactgccaaagatacggtccgtattaaagacttagatcaagaaattacgagtcctgacggcgacggctttattagtaccccgacatttgattttggtaaactagcaatttcaggaagtaagcaacaatatggtttgaagaaggccgcagattactacggcaatggcactcgcaacccttatttacgcctgaatactagccaagccaattggagtttaacggcccagctatcgcaaccaaaatcagccacagacagcttgccaacaacgacccgcttgttgctaggaacggccgctgctgccagctttaccgattacaaccaaccaacagaaaccaggacaccacttggcaagaccagcaccgtgactttaaccgccgacaataccgcaacagcggtggtcgcaaaccaacagttcacaggcagtgacgtctatcagttggacttcacgtttgctaacatcaaactagaagtgccagccaaccaaggtatggctggccaacaataccaagccgccgtcacgtggaatttagtgactggcccct

SEQ ID NO: 416 - protein, 932 aa
EQGVATSQSSDEASQTTQTTEESQATVASEAKTVPPQETARIASRAIGYSSVEGREIPFFFVEEDGTLFDPDRITMAVNLSTFSFYEEKLQRTPLEPTTVNGGKLLSIPTSPAFKYDTNNQNPSNIYGVSEVSFTIPKEYQSLDIRPSTFYTGDTTQYPVPTVFANVGGKVTNYVGANAETELELTNEKMPNKLTFGPKKTFKYTVATAPGGVTYALTYFYGDVGGPTSSHQRRGTAGPVYYYLTKRRVTEKFENPAGGAIPAPEGYTQDKKTIVTGEDFTFTQEGTLPERYTGSDGKTYLFKGWYKGNAKPSTLETTKTPSYAVTYDDNDDLHVVYEEAVMKTYTLPAREALFGYVDEQGNLINPAKFKLSATMGESDGATGEMTTFPTIDGIDMPASQLKKLAIPQKVYTRPDDGTIVTYGPQEVSVEIPKYYQTISISPTTAYTGDKTKYPVPNEVRRGIENPDNIVSSLVGXXAYNLTQKSATRYTARRSYWXWGPTKTLYSMSIYSGTAGGNYNLSTPDGTIYYYLENRRVTEHFVDESGAKITPPTGFTQGNQLVVDSENYVYTVAKALPKIYQAGEKTYIFQGWFKGKTKPATLKTTTTPSFTPTFNDEDDMTAVYQEAIPTAELTLTGAVDIIENGATMDYWEALLKNTGEAPLTTIKIKPTATWAAGIGAPNTIFVQGTGQNTKAFPVTKEQWTTGAGVSITLDQPLPAGGQLKMNLLGTAVTGNPGQVLTADVEVTGNFGSLTAKDTVRIKDLDQEITSPDGDGFISTPTFDFGKLAISGSKQQYGLKKAADYYGNGTRNPYLRLNTSQANWSLTAQLSQPKSATDSLPTTTRLLLGTAAAASFTDYNQPTETRTPLGKTSTVTLTADNTATAVVANQQFTGSDVYQLDFTFANIKLEVPANQGMAGQQYQAAVTWNLVTGP

SEQ ID NO: 417 - DNA, 3840 bp; double-stranded, linear
taatcggtttggcgggaatcgtacatagaaagaagggacgacatgaagcaaactaagtggcaacgattagcaaccattggcttgtgtagttctttagtaattaacgccttttctggtgtgacggcagttgcggaaaccgtgacgattgaaagtagtccgaccgccgaaagtagtgccaaggaagagacgcaagcaagtagcgtgaaggaagaaacaacgaaagccagtacggaaaatagtcaagtaacaactgacacgagtcaggaagaagcaacgaaagaagcggagaaagaagaaccgcaagcagaagtggaacaagcagaaacaccaatcattcctaaaccaaaaaaaatcaatatgaaggcaacttattcattttctgcagaaacttatcagtttggatttgtgaatgaatcaggtcaattaataaatccagatattataccaattacgtatagctatgccaaaggatcatggaagacagatggttataatcgaaagtggactagtatggttcaagggagtgcttcaaccgtaggaaacttaaagaatgtaataatgccagcaacttctgtagttatgccaccaggaccgtcatatgaaggaactcaagaggtgtacacaaacttttcaattcgcataccaaaatattatgcatcagcgagtctctacaatagagaaggtaaaattgattctacttatccgttacctgctattgcactagcaggtactagaccgctatctttgactcaaagtagtgtaattagtgcattggcgctgaccagtaaaggagacaatgtttatacaccacgggaaacattttttggaggagatcctgcaggtgtaaagtttactaattttttgtatcgtataaatgactttgatgtgaaaggtaataacataggttataagactgtgagtagcccaatctattaccatctgaccaaccgccgtgtcaccgaaaacttcgtagatacaagtggcgccaaaatcacgccaccaagtaatttcacccaagggaaacaaacggtcattaacagtgatccttacacgttccaacaaagtggttttttacccgagacctacaaagttggcacgaaatcttaccgattcaaaggctggtacaaagggaaaaccaaaaccgagcctttggccaccactaaaacacctagctataaagtcacgtatgatgacaatgatgatttgacggtggtctatgaggagttttcagggtacgagctgcctgcttcgaccaatcaatttggctttgtggatgaagcgacgaacaaattaattgcccccgaccaagtgcagatgaagtataatcttactttaaatgaaaataataaaaaaacagtaatgagcagtaacttaacggggacagatacagcgacactgaaaaacttgtccgtgcctgtcaactattttgaacaatatcgcgtcaatacgttttatggcgcgagtgacattacgtttacattgcccaaacggtacaaatcaatcaatattaccaaatcagatggcaaaaccgacccagcttttcctcttcctaaaatctataatatagatcaagtagaaatgtcacacatgcctgtgaccacttataacaagttgaaacagctgtcgggccaaacgtttggctttaatgctttagccgatcaacctgaattttatacgaaaacgttatttgggacagagtctggcatcgatgacccagtcaattattatacaatgagtggccctgtttactattatttagaaaaccgcaaagtcaccgagaacttcgtagacaccaacggcgctaaaatcacaccgccaacaggtttcacccaaggtaaaaaaacggtgattacaagcgacgcctacactttcaaacaagcaggcaccttaccagacacttacacaacaggcggtaagacctacaagttcaaaggttggtacaaaggcaagtccatactcaacacattgacaactaccaaagcgccaagttatcaagtgacctacgatgacaatgatgatttgaatgtggtgtatgaagaagaaacagttacgacagtgtatccatcagtcgatatgaactttgtgaatgaaaaaggcggggctttcacaccggcgttaacttttagtggtaagtactatgcgcaaagtacgagtgcgtacttaagaaccgatttatatgacgtgacctcaaaaaataatggtaatgggcaatatacggtaagtattaataatggtagtatgccattgtcccaagaattattgaaaaaatataataatggacaaccaatcagtgctaccaacagattacagtttaatgttgataaattagccatcgaccaacaactaaaatatgttgacagcattcaattagacacagctcaaagtagcaatctgaaatcctatagatatgtgtacacgaacaatagctcactggttttcgacccaaatgtagcaccagcagaggttgaccttagttcagaatctcttaacttgcttaattttgattcagatggcacctatttttctaatgcaaataatagacttttttacacgcatttaggatatagtggcacaccaggagttaactatcttctcgtaatgtttctttttaacgccaaacctgcggataagtcaaaacttgtctacaaagtcactcgcaaacaagtcaccgaaaacttcgtggatgtcaacggtgccaaaatcactgcaccaacaggcttcacccaaggtaaccaagtaccaatgaacagtaacaccttcaagtacacagcggcaaaagctttaccagcgacgtatactacaggtggcaaagtctatacgttccaagggtggtataaagggaaaaccaagccaagtacgttgaacaaaacaacaactccaacgttcaatgcgacctttgatggcaatgacgatatgaccgccatgtataaggaagaaataccaacagctagtgtcacattaactcgaccaaaagaagtgattgatacgaataccaatgtaatctggacaacaacgatcacgaatactagcaaagcacccttacaaaatctcaccttgaaaaaagggcccaattggtcagctggtctgacgatcccgacctttatggaagtgacaccagaaggagaaacgacaaaatcaatcccagtaaatagtacactttggacagagggggttcctttaccaaatgccgttcctatcggcaaaaaagtttcagttgctttcacaactcgcgcaacagggaaaccaaacactgttttgaaagcagaagttgtagtatttggtggtattaaagatagtacagtggataacttcgtgagaattcgtccaaatgatcaagaagtagtcacaccaacgaccgaaggcttcatcagtgtgccaaccttcgacttcggccaagtgggcgttgcaggaactaagcaacaacacagcttgaaacaagccgcggattactacggtaacggcacacggaatccgtatctgcggattaagaaaacgcaacccaattggagcttaacagcgcaactgtcacaaccaaaatcagcgacagacagcttgcctacagcgacccgcttattattaggggcggcgcctgtctctagctttaccaattacaatcaaccaaccgagttgaaaaatacggtcggtaccacgagtgccattagcttaacagccaacaacacagcaacgagtattattgccaacaagcaattcacaggtagtaatgtttatcagttggacttcaccttcaataatgtcaaacttgaagtgccagccaatcaaggtgttaaagggcaacaatacaaggccgcagttacatggaacctagttacaggtccttaa

SEQ ID NO: 418 - protein, 1265 aa
MKQTKWQRLATIGLCSSLVINAFSGVTAVAETVTIESSPTAESSAKEETQASSVKEETTKASTENSQVTTDTSQEEATKEAEKEEPQAEVEQAETPIIPKPKKINMKATYSFSAETYQFGFVNESGQLINPDIIPITYSYAKGSWKTDGYNRKWTSMVQGSASTVGNLKNVIMPATSVVMPPGPSYEGTQEVYTNFSIRIPKYYASASLYNREGKIDSTYPLPAIALAGTRPLSLTQSSVISALALTSKGDNVYTPRETFFGGDPAGVKFTNFLYRINDFDVKGNNIGYKTVSSPIYYHLTNRRVTENFVDTSGAKITPPSNFTQGKQTVINSDPYTFQQSGFLPETYKVGTKSYRFKGWYKGKTKTEPLATTKTPSYKVTYDDNDDLTVVYEEFSGYELPASTNQFGFVDEATNKLIAPDQVQMKYNLTLNENNKKTVMSSNLTGTDTATLKNLSVPVNYFEQYRVNTFYGASDITFTLPKRYKSINITKSDGKTDPAFPLPKIYNIDQVEMSHMPVTTYNKLKQLSGQTFGFNALADQPEFYTKTLFGTESGIDDPVNYYTMSGPVYYYLENRKVTENFVDTNGAKITPPTGFTQGKKTVITSDAYTFKQAGTLPDTYTTGGKTYKFKGWYKGKSILNTLTTTKAPSYQVTYDDNDDLNVVYEEETVTTVYPSVDMNFVNEKGGAFTPALTFSGKYYAQSTSAYLRTDLYDVTSKNNGNGQYTVSINNGSMPLSQELLKKYNNGQPISATNRLQFNVDKLAIDQQLKYVDSIQLDTAQSSNLKSYRYVYTNNSSLVFDPNVAPAEVDLSSESLNLLNFDSDGTYFSNANNRLFYTHLGYSGTPGVNYLLVMFLFNAKPADKSKLVYKVTRKQVTENFVDVNGAKITAPTGFTQGNQVPMNSNTFKYTAAKALPATYTTGGKVYTFQGWYKGKTKPSTLNKTTTPTFNATFDGNDDMTAMYKEEIPTASVTLTRPKEVIDTNTNVIWTTTITNTSKAPLQNLTLKKGPNWSAGLTIPTFMEVTPEGETTKSIPVNSTLWTEGVPLPNAVPIGKKVSVAFTTRATGKPNTVLKAEVVVFGGIKDSTVDNFVRIRPNDQEVVTPTTEGFISVPTFDFGQVGVAGTKQQHSLKQAADYYGNGTRNPYLRIKKTQPNWSLTAQLSQPKSATDSLPTATRLLLGAAPVSSFTNYNQPTELKNTVGTTSAISLTANNTATSIIANKQFTGSNVYQLDFTFNNVKLEVPANQGVKGQQYKAAVTWNLVTGP

SEQ ID NO: 419 - DNA, 3695 bp; double-stranded, linear
cgtgacgattgaaagtagtccgaccgccgaaagtagtgccaaggaagagacgcaagcaagtagcgtgaaggaagaaacaacgaaagccagtacggaaaatagtcaagtaacaactgacacgagtcaggaagaagcaacgaaagaagcggagaaagaagaaccgcaagcagaagtggaacaagcagaaacaccaatcattcctaaaccaaaaaaaatcaatatgaaggcaacttattcattttctgcagaaacttatcagtttggatttgtgaatgaatcaggtcaattaataaatccagatattataccaattacgtatagctatgccaaaggatcatggaagacagatggttataatcgaaagtggactagtatggttcaagggagtgcttcaaccgtaggaaacttaaagaatgtaataatgccagcaacttctgtagttatgccaccaggaccgtcatatgaaggaactcaagaggtgtacacaaacttttcaattcgcataccaaaatattatgcatcagcgagtctctacaatagagaaggtaaaattgattctacttatccgttacctgctattgcactagcaggtactagaccgctatctttgactcaaagtagtgtaattagtgcattggcgctgaccagtaaaggagacaatgtttatacaccacgggaaacattttttggaggagatcctgcaggtgtaaagtttactaattttttgtatcgtataaatgactttgatgtgaaaggtaataacataggttataagactgtgagtagcccaatctattaccatctgaccaaccgccgtgtcaccgaaaacttcgtagatacaagtggcgccaaaatcacgccaccaagtaatttcacccaagggaaacaaacggtcattaacagtgatccttacacgttccaacaaagtggttttttacccgagacctacaaagttggcacgaaatcttaccgattcaaaggctggtacaaagggaaaaccaaaaccgagcctttggccaccactaaaacacctagctataaagtcacgtatgatgacaatgatgatttgacggtggtctatgaggagttttcagggtacgagctgcctgcttcgaccaatcaatttggctttgtggatgaagcgacgaacaaattaattgcccccgaccaagtgcagatgaagtataatcttactttaaatgaaaataataaaaaaacagtaatgagcagtaacttaacggggacagatacagcgacactgaaaaacttgtccgtgcctgtcaactattttgaacaatatcgcgtcaatacgttttatggcgcgagtgacattacgtttacattgcccaaacggtacaaatcaatcaatattaccaaatcagatggcaaaaccgacccagcttttcctcttcctaaaatctataatatagatcaagtagaaatgtcacacatgcctgtgaccacttataacaagttgaaacagctgtcgggccaaacgtttggctttaatgctttagccgatcaacctgaattttatacgaaaacgttatttgggacagagtctggcatcgatgacccagtcaattattatacaatgagtggccctgtttactattatttagaaaaccgcaaagtcaccgagaacttcgtagacaccaacggcgctaaaatcacaccgccaacaggtttcacccaaggtaaaaaaacggtgattacaagcgacgcctacactttcaaacaagcaggcaccttaccagacacttacacaacaggcggtaagacctacaagttcaaaggttggtacaaaggcaagtccatactcaacacattgacaactaccaaagcgccaagttatcaagtgacctacgatgacaatgatgatttgaatgtggtgtatgaagaagaaacagttacgacagtgtatccatcagtcgatatgaactttgtgaatgaaaaaggcggggctttcacaccggcgttaacttttagtggtaagtactatgcgcaaagtacgagtgcgtacttaagaaccgatttatatgacgtgacctcaaaaaataatggtaatgggcaatatacggtaagtattaataatggtagtatgccattgtcccaagaattattgaaaaaatataataatggacaaccaatcagtgctaccaacagattacagtttaatgttgataaattagccatcgaccaacaactaaaatatgttgacagcattcaattagacacagctcaaagtagcaatctgaaatcctatagatatgtgtacacgaacaatagctcactggttttcgacccaaatgtagcaccagcagaggttgaccttagttcagaatctcttaacttgcttaattttgattcagatggcacctatttttctaatgcaaataatagacttttttacacgcatttaggatatagtggcacaccaggagttaactatcttctcgtaatgtttctttttaacgccaaacctgcggataagtcaaaacttgtctacaaagtcactcgcaaacaagtcaccgaaaacttcgtggatgtcaacggtgccaaaatcactgcaccaacaggcttcacccaaggtaaccaagtaccaatgaacagtaacaccttcaagtacacagcggcaaaagctttaccagcgacgtatactacaggtggcaaagtctatacgttccaagggtggtataaagggaaaaccaagccaagtacgttgaacaaaacaacaactccaacgttcaatgcgacctttgatggcaatgacgatatgaccgccatgtataaggaagaaataccaacagctagtgtcacattaactcgaccaaaagaagtgattgatacgaataccaatgtaatctggacaacaacgatcacgaatactagcaaagcacccttacaaaatctcaccttgaaaaaagggcccaattggtcagctggtctgacgatcccgacctttatggaagtgacaccagaaggagaaacgacaaaatcaatcccagtaaatagtacactttggacagagggggttcctttaccaaatgccgttcctatcggcaaaaaagtttcagttgctttcacaactcgcgcaacagggaaaccaaacactgttttgaaagcagaagttgtagtatttggtggtattaaagatagtacagtggataacttcgtgagaattcgtccaaatgatcaagaagtagtcacaccaacgaccgaaggcttcatcagtgtgccaaccttcgacttcggccaagtgggcgttgcaggaactaagcaacaacacagcttgaaacaagccgcggattactacggtaacggcacacggaatccgtatctgcggattaagaaaacgcaacccaattggagcttaacagcgcaactgtcacaaccaaaatcagcgacagacagcttgcctacagcgacccgcttattattaggggcggcgcctgtctctagctttaccaattacaatcaaccaaccgagttgaaaaatacggtcggtaccacgagtgccattagcttaacagccaacaacacagcaacgagtattattgccaacaagcaattcacaggtagtaatgtttatcagttggacttcaccttcaataatgtcaaacttgaagtgccagccaatcaaggtgttaaagggcaacaatacaaggccgcagttacatggaacctagttacag

SEQ ID NO: 420 - protein, 1231 aa
VTIESSPTAESSAKEETQASSVKEETTKASTENSQVTTDTSQEEATKEAEKEEPQAEVEQAETPIIPKPKKINMKATYSFSAETYQFGFVNESGQLINPDIIPITYSYAKGSWKTDGYNRKWTSMVQGSASTVGNLKNVIMPATSVVMPPGPSYEGTQEVYTNFSIRIPKYYASASLYNREGKIDSTYPLPAIALAGTRPLSLTQSSVISALALTSKGDNVYTPRETFFGGDPAGVKFTNFLYRINDFDVKGNNIGYKTVSSPIYYHLTNRRVTENFVDTSGAKITPPSNFTQGKQTVINSDPYTFQQSGFLPETYKVGTKSYRFKGWYKGKTKTEPLATTKTPSYKVTYDDNDDLTVVYEEFSGYELPASTNQFGFVDEATNKLIAPDQVQMKYNLTLNENNKKTVMSSNLTGTDTATLKNLSVPVNYFEQYRVNTFYGASDITFTLPKRYKSINITKSDGKTDPAFPLPKIYNIDQVEMSHMPVTTYNKLKQLSGQTFGFNALADQPEFYTKTLFGTESGIDDPVNYYTMSGPVYYYLENRKVTENFVDTNGAKITPPTGFTQGKKTVITSDAYTFKQAGTLPDTYTTGGKTYKFKGWYKGKSILNTLTTTKAPSYQVTYDDNDDLNVVYEEETVTTVYPSVDMNFVNEKGGAFTPALTFSGKYYAQSTSAYLRTDLYDVTSKNNGNGQYTVSINNGSMPLSQELLKKYNNGQPISATNRLQFNVDKLAIDQQLKYVDSIQLDTAQSSNLKSYRYVYTNNSSLVFDPNVAPAEVDLSSESLNLLNFDSDGTYFSNANNRLFYTHLGYSGTPGVNYLLVMFLFNAKPADKSKLVYKVTRKQVTENFVDVNGAKITAPTGFTQGNQVPMNSNTFKYTAAKALPATYTTGGKVYTFQGWYKGKTKPSTLNKTTTPTFNATFDGNDDMTAMYKEEIPTASVTLTRPKEVIDTNTNVIWTTTITNTSKAPLQNLTLKKGPNWSAGLTIPTFMEVTPEGETTKSIPVNSTLWTEGVPLPNAVPIGKKVSVAFTTRATGKPNTVLKAEVVVFGGIKDSTVDNFVRIRPNDQEVVTPTTEGFISVPTFDFGQVGVAGTKQQHSLKQAADYYGNGTRNPYLRIKKTQPNWSLTAQLSQPKSATDSLPTATRLLLGAAPVSSFTNYNQPTELKNTVGTTSAISLTANNTATSIIANKQFTGSNVYQLDFTFNNVKLEVPANQGVKGQQYKAAVTWNLVT

SEQ ID NO: 421 - DNA, 363 bp; double-stranded, linear
aggagtaaattaatgaaaaaaagtgttataactagttctatgttagcggttttgttgtcgggatttctcgttacccctatttctgcttacgctttggaacgctctaagggaactactgaagaaacggtggcttcagaaacatctctaacggagcgacaaatgagtagcggtgtcactgaagaaatgaacccaagcatcataaattctcaagaggaaacagaaacaacgtccacttcctcaacctccgattccaccactgaagtttctacatcagaagtaacaactgttaatgatacagaanatagtagcgacgtactgaaactactttggnaacatcacnaagtaatgaggacacacctatag

SEQ ID NO: 422 - protein, 116 aa
MKKSVITSSMLAVLLSGFLVTPISAYALERSKGTTEETVASETSLTERQMSSGVTEEMNPSIINSQEETETTSTSSTSDSTTEVSTSEVTTVNDTEXSSDVLKLLWXHHXVMRTHL

SEQ ID NO: 423 - DNA, 179 bp; double-stranded, linear
ggaacgctctaagggaactactgaagaaacggtggcttcagaaacatctctaacggagcgacaaatgagtagcggtgtcactgaagaaatgaacccaagcatcataaattctcaagaggaaacagaaacaacgtccacttcctcaacctccgattccaccactgaagtttctacatcag

SEQ ID NO: 424 - protein, 59 aa
ERSKGTTEETVASETSLTERQMSSGVTEEMNPSIINSQEETETTSTSSTSDSTTEVSTS

SEQ ID NO: 425 - DNA, 888 bp; double-stranded, linear
taaataaaaatggataaggagtggcataatcttatgaaaaagttctccatacgaaaaattagtgctggttttttgtttctgattttagtaactttgatcgccggttttagcttgtctgcaaatgcagaagagtatatcgttcctgccgaaagtcattcacgacaaaaaagatcgttactggaccctgaggacagaagacaagaagtggcagatacaaccgaagcgccttttgcgtcaatcggaagaatcatttcccctgccagtaaaccaggctatatttctttaggaacaggctttgttgttggaaccaatacaattgtcaccaataatcatgtggctgaaagttttaagaatgccaaagtattaaatccgaatgccaaagatgatgcttggttttatccaggtcgagatggcagtgcgacaccatttggcaaattcaaagtgattgatgtagctttttccccgaatgcggatattgcggtagtgactgtcggcaaacaaaacgatcgtccagatggcccagagttgggagaaattttaacgccatttgttttgaaaaagtttgaatcttcagatacccatgtcacaatatcaggctatccaggtgagaaaaaccacacacaatggtctcatgaaaatgatttgtttacatctaactttacagacttagaaaatccattactattttatgatatcgatacaaccggcggtcaatctggttcaccaatctataatgatcaggttgaagtagttggtgttcattccaatggcggcattaagcaaacaggaaatcatggtcaaagactaaatgaagtgaattataactttattgttaatcgagtgaatgaagaagaaaataaacgtttatccgctgtgccagcagcgtaa

SEQ ID NO: 426 - protein, 284 aa
MKKFSIRKISAGFLFLILVTLIAGFSLSANAEEYIVPAESHSRQKRSLLDPEDRRQEVADTTEAPFASIGRIISPASKPGYISLGTGFVVGTNTIVTNNHVAESFKNAKVLNPNAKDDAWFYPGRDGSATPFGKFKVIDVAFSPNADIAVVTVGKQNDRPDGPELGEILTPFVLKKFESSDTHVTISGYPGEKNHTQWSHENDLFTSNFTDLENPLLFYDIDTTGGQSGSPIYNDQVEVVGVHSNGGIKQTGNHGQRLNEVNYNFIVNRVNEEENKRLSAVPAA

SEQ ID NO: 427 - DNA, 758 bp; double-stranded, linear
agagtatatcgttcctgccgaaagtcattcacgacaaaaaagatcgttactggaccctgaggacagaagacaagaagtggcagatacaaccgaagcgccttttgcgtcaatcggaagaatcatttcccctgccagtaaaccaggctatatttctttaggaacaggctttgttgttggaaccaatacaattgtcaccaataatcatgtggctgaaagttttaagaatgccaaagtattaaatccgaatgccaaagatgatgcttggttttatccaggtcgagatggcagtgcgacaccatttggcaaattcaaagtgattgatgtagctttttccccgaatgcggatattgcggtagtgactgtcggcaaacaaaacgatcgtccagatggcccagagttgggagaaattttaacgccatttgttttgaaaaagtttgaatcttcagatacccatgtcacaatatcaggctatccaggtgagaaaaaccacacacaatggtctcatgaaaatgatttgtttacatctaactttacagacttagaaaatccattactattttatgatatcgatacaaccggcggtcaatctggttcaccaatctataatgatcaggttgaagtagttggtgttcattccaatggcggcattaagcaaacaggaaatcatggtcaaagactaaatgaagtgaattataactttattgttaatcgagtgaatgaagaagaaaataaacgtttatccgctgtgccagcagcgt

SEQ ID NO: 428 - protein, 252 aa
EYIVPAESHSRQKRSLLDPEDRRQEVADTTEAPFASIGRIISPASKPGYISLGTGFVVGTNTIVTNNHVAESFKNAKVLNPNAKDDAWFYPGRDGSATPFGKFKVIDVAFSPNADIAVVTVGKQNDRPDGPELGEILTPFVLKKFESSDTHVTISGYPGEKNHTQWSHENDLFTSNFTDLENPLLFYDIDTTGGQSGSPIYNDQVEVVGVHSNGGIKQTGNHGQRLNEVNYNFIVNRVNEEENKRLSAVPAA

SEQ ID NO: 429 - DNA, 1803 bp; double-stranded, linear
tgatcaatacacttcgatacggtcgctttttttctagagaaagttgaatctttcaataataaaaagggatacactccatttggcatagtccttgctgataataaatcagtgtataaagcgctatcattttataggaggggttttatgaagggtttatcaaaaaagaaacgggtgtctacttggttagcgttaggaatcaccgtagtcagctgttttgcgttaagcagggaagtgcaagcaagtgttgaaagaacaaaagttgatgaatttgcaaatgttttagatgtgagtgcatcaccaaccgaacggacgaatggcgtatacgataccaattattttaataatttttctgatttaggtgcatggcatggctactatttacctgaaaaaagcaataaagagctactgggtggttttgcggggccattgattattgcggaagaatatccagtaaacttggcggcaagtttaaacaaattaacggtcaaaaataaaaaaacgggagaaacctatgatttaagccaaagcaaccgcatggacctgtcttattatcctgggcgcctagagcaaacctatgaattagacgatttaacgattcatttagctttaatttttgtcagcaatcgaacggcgcttatccaaacgacacttgaaaacactggtgaagagcccttgtcacttggagcaagctggacaggtgcggtctttgacaaaattcaagagggaacggaaaccttagatattggcactcgtttaactgctaaagacaatgacattcaagtgaattttggtgaagtcagagaaacgtggaattattttgctacgaaagacacaaaatatacgattcatcatgcggataaagtttcaacaaaaattgataatcggaattatacagcaaccgctgaaccaattgaattgaagcctaaacaaacgtacaacacctatacgacagaaagctatacttttacaaaagaagaagaggcaaaggaacaacaacaagcacccgaatataccaaaaatgcggcgcgctatttcaaagagaacaagcaaagatggcaaggatatctagataaaacgtttgatcaaaagaaaacagcagaatttcctgaatatcaaaatgcgctagtcaaatcgattgaaacgattaataccaattggcgaagtgcggcaggtgcctttaagcatgacgggattgttccgtccatgtcttataaatggtttattggtatgtgggcttgggattcgtggaaagcggatgtagcaacggctgattttaatcctgagttagctaaaaataatatgcgggccttgtttgattatcaaattcaaaaagatgataccgtacgtccacaagatgcaggagcgatcattgatgctgtcttttacaatcaagacagtgcgcgtggtggtgaaggtggcaactggaatgaacgaaattctaaaccaccattggctgcatgggcagtttggcatatttatcaagaaaccaaagataaggaatttttaaaagaaatgtatcccaaacttgtggcttatcataattggtggtataccaacagagaccacaataaaaatgggatagcagaatatggaagcatggtcagtgatgctcactggcaaaaagacgacaaggatcaaatcattaaagataaaaatggccacctaaagtggatgatgatgctgttattgaagcagccgcgtgggaaagtggcatggataacgctacacggtttgacaaagaaggtgtgggcaaaggcgacgttggagttaaagtttttgaaaacaaaaataaaggaaaagtag

SEQ ID NO: 430 - protein, 552 aa
MKGLSKKKRVSTWLALGITVVSCFALSREVQASVERTKVDEFANVLDVSASPTERTNGVYDTNYFNNFSDLGAWHGYYLPEKSNKELLGGFAGPLIIAEEYPVNLAASLNKLTVKNKKTGETYDLSQSNRMDLSYYPGRLEQTYELDDLTIHLALIFVSNRTALIQTTLENTGEEPLSLGASWTGAVFDKIQEGTETLDIGTRLTAKDNDIQVNFGEVRETWNYFATKDTKYTIHHADKVSTKIDNRNYTATAEPIELKPKQTYNTYTTESYTFTKEEEAKEQQQAPEYTKNAARYFKENKQRWQGYLDKTFDQKKTAEFPEYQNALVKSIETINTNWRSAAGAFKHDGIVPSMSYKWFIGMWAWDSWKADVATADFNPELAKNNMRALFDYQIQKDDTVRPQDAGAIIDAVFYNQDSARGGEGGNWNERNSKPPLAAWAVWHIYQETKDKEFLKEMYPKLVAYHNWWYTNRDHNKNGIAEYGSMVSDAHWQKDDKDQIIKDKNGHLKWMMMLLLKQPRGKVAWITLHGLTKKVWAKATLELKFLKTKIKEK

SEQ ID NO: 431 - DNA, 1515 bp; double-stranded, linear
tgatgaatttgcaaatgttttagatgtgagtgcatcaccaaccgaacggacgaatggcgtatacgataccaattattttaataatttttctgatttaggtgcatggcatggctactatttacctgaaaaaagcaataaagagctactgggtggttttgcggggccattgattattgcggaagaatatccagtaaacttggcggcaagtttaaacaaattaacggtcaaaaataaaaaaacgggagaaacctatgatttaagccaaagcaaccgcatggacctgtcttattatcctgggcgcctagagcaaacctatgaattagacgatttaacgattcatttagctttaatttttgtcagcaatcgaacggcgcttatccaaacgacacttgaaaacactggtgaagagcccttgtcacttggagcaagctggacaggtgcggtctttgacaaaattcaagagggaacggaaaccttagatattggcactcgtttaactgctaaagacaatgacattcaagtgaattttggtgaagtcagagaaacgtggaattattttgctacgaaagacacaaaatatacgattcatcatgcggataaagtttcaacaaaaattgataatcggaattatacagcaaccgctgaaccaattgaattgaagcctaaacaaacgtacaacacctatacgacagaaagctatacttttacaaaagaagaagaggcaaaggaacaacaacaagcacccgaatataccaaaaatgcggcgcgctatttcaaagagaacaagcaaagatggcaaggatatctagataaaacgtttgatcaaaagaaaacagcagaatttcctgaatatcaaaatgcgctagtcaaatcgattgaaacgattaataccaattggcgaagtgcggcaggtgcctttaagcatgacgggattgttccgtccatgtcttataaatggtttattggtatgtgggcttgggattcgtggaaagcggatgtagcaacggctgattttaatcctgagttagctaaaaataatatgcgggccttgtttgattatcaaattcaaaaagatgataccgtacgtccacaagatgcaggagcgatcattgatgctgtcttttacaatcaagacagtgcgcgtggtggtgaaggtggcaactggaatgaacgaaattctaaaccaccattggctgcatgggcagtttggcatatttatcaagaaaccaaagataaggaatttttaaaagaaatgtatcccaaacttgtggcttatcataattggtggtataccaacagagaccacaataaaaatgggatagcagaatatggaagcatggtcagtgatgctcactggcaaaaagacgacaaggatcaaatcattaaagataaaaatggccacctaaagtggatgatgatgctgttattgaagcagccgcgtgggaaagtggcatggataacgctacacggtttgacaaagaaggtgtgggcaaaggcgacgttggagttaaagtt

SEQ ID NO: 432 - protein, 504 aa
DEFANVLDVSASPTERTNGVYDTNYFNNFSDLGAWHGYYLPEKSNKELLGGFAGPLIIAEEYPVNLAASLNKLTVKNKKTGETYDLSQSNRMDLSYYPGRLEQTYELDDLTIHLALIFVSNRTALIQTTLENTGEEPLSLGASWTGAVFDKIQEGTETLDIGTRLTAKDNDIQVNFGEVRETWNYFATKDTKYTIHHADKVSTKIDNRNYTATAEPIELKPKQTYNTYTTESYTFTKEEEAKEQQQAPEYTKNAARYFKENKQRWQGYLDKTFDQKKTAEFPEYQNALVKSIETINTNWRSAAGAFKHDGIVPSMSYKWFIGMWAWDSWKADVATADFNPELAKNNMRALFDYQIQKDDTVRPQDAGAIIDAVFYNQDSARGGEGGNWNERNSKPPLAAWAVWHIYQETKDKEFLKEMYPKLVAYHNWWYTNRDHNKNGIAEYGSMVSDAHWQKDDKDQIIKDKNGHLKWMMMLLLKQPRGKVAWITLHGLTKKVWAKATLELK

SEQ ID NO: 433 - DNA, 411 bp; double-stranded, linear
taattcgatggagaaggtggtttagtgaaaagattttcattttttttactaattttacttgctttaacaggttgtaaatccggtgaaaaagaatttgatgaagaatctcttcaaaatctaaaggaaacgncacagtcttantcagaaacagaattacaaaatggtgacgttcgtttaaatgaatatatttctttgaaaggggagattgttgagagtgacagtcgttccagtttaataaaaaaaggtgatcgttttattttgaaaagtggttctagtaaatatcaagtttntaatgagcaaaagaaaaaattgaagattggtgacgaagtgacagtttacggagaatattacggctttttgaaagggacattaattgaaagtgaggagaatcatgattcagccacgaattag

SEQ ID NO: 434 - protein, 128 aa
VKRFSFFLLILLALTGCKSGEKEFDEESLQNLKETXQSXSETELQNGDVRLNEYISLKGEIVESDSRSSLIKKGDRFILKSGSSKYQVXNEQKKKLKIGDEVTVYGEYYGFLKGTLIESEENHDSATN

SEQ ID NO: 435 - DNA, 309 bp; double-stranded, linear
tgaagaatctcttcaaaatctaaaggaaacgncacagtcttantcagaaacagaattacaaaatggtgacgttcgtttaaatgaatatatttctttgaaaggggagattgttgagagtgacagtcgttccagtttaataaaaaaaggtgatcgttttattttgaaaagtggttctagtaaatatcaagtttntaatgagcaaaagaaaaaattgaagattggtgacgaagtgacagtttacggagaatattacggctttttgaaagggacattaattgaaagtgaggagaatcatgattcagccacgaa

SEQ ID NO: 436 - protein, 103 aa
EESLQNLKETXQSXSETELQNGDVRLNEYISLKGEIVESDSRSSLIKKGDRFILKSGSSKYQVXNEQKKKLKIGDEVTVYGEYYGFLKGTLIESEENHDSATN

SEQ ID NO: 437 - DNA, 366 bp; double-stranded, linear
tgagggggaaaaagtgtgttaaaaagaaaagtggggattgtcgcaggcgttttctgttcagctttgttactgacaggttgtggcaaaagtgcgaaagatgagttcattcaaggaatcggcaatcanaacgcacaagaatctggggtttgngatttctctatgtcaattagtgacatgaaattttcacaagaagatggtgcacaaacgaatcctatgattgggatgctcatcacgcaaatcaaagacgcatcgctttctggggaagattcaagtagatgccaaaaaagaaaaagcattcaacttagagatgaaattaaaagcgatgggaatggatgtaccgatttcattggttggatcgttagataa

SEQ ID NO: 438 - protein, 116 aa
VLKRKVGIVAGVFCSALLLTGCGKSAKDEFIQGIGNXNAQESGVXDFSMSISDMKFSQEDGAQTNPMIGMLITQIKDASLSGEDSSRCQKRKSIQLRDEIKSDGNGCTDFIGWIVR

SEQ ID NO: 439 - DNA, 272 bp; double-stranded, linear
gaaagatgagttcattcaaggaatcggcaatcanaacgcacaagaatctggggtttgngatttctctatgtcaattagtgacatgaaattttcacaagaagatggtgcacaaacgaatcctatgattgggatgctcatcacgcaaatcaaagacgcatcgctttctggggaagattcaagtagatgccaaaaaagaaaaagcattcaacttagagatgaaattaaaagcgatgggaatggatgtaccgatttcattggttggatcgttagat

SEQ ID NO: 440 - protein, 90 aa
KDEFIQGIGNXNAQESGVXDFSMSISDMKFSQEDGAQTNPMIGMLITQIKDASLSGEDSSRCQKRKSIQLRDEIKSDGNGCTDFIGWIVR

SEQ ID NO: 441 - DNA, 606 bp; double-stranded, linear
taaagaataccgagtaaaattttcggaaggctttttttcaaaaattgtatatgcaaaagaagtgcaacggaaaggagctcggaaatcgtgaataagctacctttacttattttattgttaggcggagtgttgcttgttagtggctgtcaaagccataaggaagaaaacaagtctagtaaagtatcgacagaagaaacgacagtgattgaaacagtagcaagggaacaatcgaaggaatcgtttacgagtgaagcaactaaaaaacagacagaaacaacgaaattagaagaaccagatcatgtaaaacttctagaagcttatggaaatgcgtatgcgaactttacaagtattaatgatcgcaatgaaaagctaaagcccctcatgactgaaaaatgtatcaaaaaaaatggaattgatgttaaaactggagtagcgttagtttccgtaggaaaggttacaacgatttataaaaatgatcaacatgaatatgctttacttttggattgtgaacaaaatggaacgcagacacgagtgttacttttggctaaggtgaagaacaataaaatttctgaaatgacctataattcagttaagcaagagtattag

SEQ ID NO: 442 - protein, 172 aa
VNKLPLLILLLGGVLLVSGCQSHKEENKSSKVSTEETTVIETVAREQSKESFTSEATKKQTETTKLEEPDHVKLLEAYGNAYANFTSINDRNEKLKPLMTEKCIKKNGIDVKTGVALVSVGKVTTIYKNDQHEYALLLDCEQNGTQTRVLLLAKVKNNKISEMTYNSVKQEY

SEQ ID NO: 443 - DNA, 442 bp; double-stranded, linear
agaaaacaagtctagtaaagtatcgacagaagaaacgacagtgattgaaacagtagcaagggaacaatcgaaggaatcgtttacgagtgaagcaactaaaaaacagacagaaacaacgaaattagaagaaccagatcatgtaaaacttctagaagcttatggaaatgcgtatgcgaactttacaagtattaatgatcgcaatgaaaagctaaagcccctcatgactgaaaaatgtatcaaaaaaaatggaattgatgttaaaactggagtagcgttagtttccgtaggaaaggttacaacgatttataaaaatgatcaacatgaatatgctttacttttggattgtgaacaaaatggaacgcagacacgagtgttacttttggctaaggtgaagaacaataaaatttctgaaatgacctataattcagttaagcaagagtat

SEQ ID NO: 444 - protein, 147 aa
ENKSSKVSTEETTVIETVAREQSKESFTSEATKKQTETTKLEEPDHVKLLEAYGNAYANFTSINDRNEKLKPLMTEKCIKKNGIDVKTGVALVSVGKVTTIYKNDQHEYALLLDCEQNGTQTRVLLLAKVKNNKISEMTYNSVKQEY

SEQ ID NO: 445 - DNA, 480 bp; double-stranded, linear
tgaataggcgtgaaaaagggaatgttagcgttttttgtcgtgctagcggttttatcattaactgcttgtcgggaaccaaaagnaaagaaagtaaccgcttcaacggaggcatcctctaaagttgaagagacgaatgaaaaaacgagtgaaacaattgataagacaaacgaacaagcgagcagcagtgtcgagtctaacgaatcagtgaaaaatgaagagccgacagctgatggaaacaatagtcagctaactgtagctgatttagatactacagcgattaatgctggcgattttactactttagttggaatatggaaaaatggtaaaggagagagtttgatcattcatcctgatggtagtacaaataccggaggaatgattacgaaggattcacctactgatgagtcgcgaccaattacaagcttaagtattaggtgggggcctactggtgctgcgctattattatataaaattggtgtt

SEQ ID NO: 446 - protein, 157 aa
VKKGMLAFFVVLAVLSLTACREPKXKKVTASTEASSKVEETNEKTSETIDKTNEQASSSVESNESVKNEEPTADGNNSQLTVADLDTTAINAGDFTTLVGIWKNGKGESLIIHPDGSTNTGGMITKDSPTDESRPITSLSIRWGPTGAALLLYKIGV

SEQ ID NO: 447 - DNA, 396 bp; double-stranded, linear
aagaaagtaaccgcttcaacggaggcatcctctaaagttgaagagacgaatgaaaaaacgagtgaaacaattgataagacaaacgaacaagcgagcagcagtgtcgagtctaacgaatcagtgaaaaatgaagagccgacagctgatggaaacaatagtcagctaactgtagctgatttagatactacagcgattaatgctggcgattttactactttagttggaatatggaaaaatggtaaaggagagagtttgatcattcatcctgatggtagtacaaataccggaggaatgattacgaaggattcacctactgatgagtcgcgaccaattacaagcttaagtattaggtgggggcctactggtgctgcgctattattatataaaattggtgtt

SEQ ID NO: 448 - protein, 132 aa
KKVTASTEASSKVEETNEKTSETIDKTNEQASSSVESNESVKNEEPTADGNNSQLTVADLDTTAINAGDFTTLVGIWKNGKGESLIIHPDGSTNTGGMITKDSPTDESRPITSLSIRWGPTGAALLLYKIGV

SEQ ID NO: 449 - DNA, 3963 bp; double-stranded, linear
tgaaacacaaggaggaaatttgtgaaaaagttgagctttaaaaaagtgaagtggggcatgcattttttaatggctgttgcgttgatagcgccaagtgttactagtacggcatatgcagtagaaacaacgagtcaacaaagttcagaagcagtaacaagtaccaccgattcaagtagaaaacaagaaccagtcattacacaggaaacaacagacatcaaacaagaagcaccaaatcaggctacgagtgacagtgtcaagcagtcacaagaaaccacagcaccaacagagacgacgaatttagaaacgtcaatcgctgaaaaagaagaaacgagcacgccgcaaaaaataacaattttaggtacgtcagatgttcatggtcaattatggaattggtcttatgaagatgataaagaactaccagttggtttgtcccaagtaagtacagtcgttaaccaagtccgggcacaaaacccagcaggcaccgttttaattgataatggcgacaatattcaaggcactattttaacagatgacttgtataataaagcgcctttagtgaatgaaaagacccatccaatgatcaccgccatgaatgtgatgaagtatgatgcaatggttttgggaaatcatgagtttaattttggtttaccgttaatcaaaaaaattcaacaagaagccacttttccaatcttgtctgcgaatacctacaataaggaagatggtcttcgttttgttgaagggactaccacgaaggaacttgattttaatcaagatgggcagccagatttaaaagttgggattatcggcttaacaattccgcacattcctttgtgggatggccctcgtgttacttcgcttaattttttacctttgaaagaagaagcagaaaaagcagttactgagttgaaagctaacgatcaggctgacattattgttgcctcgattcatgcgggacaacaaaatagtgatccggctgccagtgccgaccaagtaattgaaaatgtcgcggggattgatgcgtatattctgggtcatgaccacctttcttttaccaagcaaggagcagcgccgaatggaaaaactgtaccggtagggggaccgaaagatacggggacagaagttgtcaaaattgatctttcagttgctaaaaatgccgataagtgggaagtgcaagaaggtacagcaacgattgtaccaacaacgaatgttccagcagatgaagcagttaaggcagcgacaaaagaataccatgaaaaaacgcgagcgtttattcaggaggagatcggcacagcaacagctgattttttaccaaaacaagaaattaaaggaattcccgaagcacaattacaaccaacagcgatgatttctttaattaataacgttcaaaaagaagtaacgggcgcacaattaagtgcggcagcgctgtttaaatacgacagtaaattacctgcggggaagatttcctatgccacgatttttgatatctacaaatacccgaataccttagtgagtgttcccattaacggtgaaaacttactgaagtatttagaaaaacaaggggcgtactataaccaaacacagccagatgatttgaccattagttttaatccaaacattcgtgtatataactatgacatgatttctggagtggactacaagattgacatttcaaaaccagtgggtgaacgaattgtagatgcgaaaattgacggccaaccgctggatcctgccaaagaatatacgattgctatgaataattatcgttacggcggtttagctagccaagggattcaagtaggggaacctattaaaaattctgatccagaaaccttacgaggaatgattgttgattatattaagaaaaaaggaactcttgatccagaacaagaaatcgaacgaaattggtcaattattgggacaaattttgatgaaaaatggcgtgccaaagcaatcgaattagtgaatgacggcactcttcaaattccgacttctcctgatggacgtacaccaaacgccgccgctattacgaaacaagatgtccgtaatgcgggctttgatttagataatgcatataccattatgcacacaaatgacgttcatggccgactagaagcagggaaaggcgaattaggtatggcgcgtctaaaaacctttaaagaccaagaaaacccaaccttgatggtggatgcaggggatgttttccaaggattaccaatctccaatttctccaaaggcgcggatatggccaaagcaatgaatgaagttggttatgatgccatggcggtgggaaatcacgagtttgattttggtttagagattgcactaggttataaagaccaactgaattttccgattttatctagtaatacgtattacaaagatggcagtggacgggtttttgatccgtatacaatcgtagaaaaatccgggaaaaagtttgccattgtaggtgtgacgaccccagaaacagcaacgaaaacacacccgaaaaacgtagagaaggtgacatttaaagacccgattccagaagtagaagcagtgattaaggaaattaaagagaagtacgcggatatncaagctttcgtggttactgggcatttaggcgtagatgaaacgacgccgcatatctggcgtggtgatacgctagcagaaacccttagtcaaacatatcctgagttagatatcactgtgattgatggacattcgcatacagccgtcgaaagtggcaaacgttatggcaaagtgatctatgctcaaacaggtaattatttaaataatgttgggatcgtcacagcaccagagagtgaaccaactaagaaaacaacaaaattgatttcagcagcagagctgctagaattgccagaaaacccggcagttaaagccatcgttgatgaagcacgtacgaattttaacgctgaaaatgaaaaagtaattgtcgattatattccattcacattggatggacaacgagaaaatgtgcgcacacgagagaccaacttagggaatttgattggtgatgcgattatgtcatatggccaagacgcgtttagccaacctgctgattttgcagtaactaatggtggcggcattcgcgctgatattaaacaagggccaattaaagttggggatgtcattgctgtgttaccttttggcaatagcattgcgcaaattcaagtaaccggcgcccaagttaaagaaatgtttgaaatgtctgttcgttcgattccacaaaaagatgagaatggcacaattttactagatgatgctggccaaccaaaacttggcgcaaatggtggtttcctacatgtttcaagctccattcgtatccactatgattccacaaaaccaggtactcgcttggctagtgacgaaggcaatgaaacaggacaaacgattgtcggtagtcgcgtattaggaatagaaattaaaaatcggcaaacacaaaagtttgaaccattggatgagaagaaacaataccggatggctaccaatgatttcttagctgctggtggtgatggttacgatatgctaggtggtgaacgagaagaagggatttcactagattctgtcttaattgaatacttgaaaagtgcaaccagcttgcggttgtatcgtgcagcaacgacgattgatttagcacaatataaagaaccattcccaggcgaacgaattgtttctatttcggaagaagcttacaaagagttaatcggtggaggagagacgccaaaaccagatccaaaaccagacccgaaaccaacaccagaaacaccagtagcaaccaataaacaaaaccaagcgggagcaagacagagcaatccatccgtaacagagaagaaaaagtatggcggctttttacctaaaacgggtacagaaacagaaacgcttgcattatatggtttactgttcgttggactttcttcttctggctggtatatttataaacgacgtaacaaagctagttag

SEQ ID NO: 450 - protein, 1313 aa
VKKLSFKKVKWGMHFLMAVALIAPSVTSTAYAVETTSQQSSEAVTSTTDSSRKQEPVITQETTDIKQEAPNQATSDSVKQSQETTAPTETTNLETSIAEKEETSTPQKITILGTSDVHGQLWNWSYEDDKELPVGLSQVSTVVNQVRAQNPAGTVLIDNGDNIQGTILTDDLYNKAPLVNEKTHPMITAMNVMKYDAMVLGNHEFNFGLPLIKKIQQEATFPILSANTYNKEDGLRFVEGTTTKELDFNQDGQPDLKVGIIGLTIPHIPLWDGPRVTSLNFLPLKEEAEKAVTELKANDQADIIVASIHAGQQNSDPAASADQVIENVAGIDAYILGHDHLSFTKQGAAPNGKTVPVGGPKDTGTEVVKIDLSVAKNADKWEVQEGTATIVPTTNVPADEAVKAATKEYHEKTRAFIQEEIGTATADFLPKQEIKGIPEAQLQPTAMISLINNVQKEVTGAQLSAAALFKYDSKLPAGKISYATIFDIYKYPNTLVSVPINGENLLKYLEKQGAYYNQTQPDDLTISFNPNIRVYNYDMISGVDYKIDISKPVGERIVDAKIDGQPLDPAKEYTIAMNNYRYGGLASQGIQVGEPIKNSDPETLRGMIVDYIKKKGTLDPEQEIERNWSIIGTNFDEKWRAKAIELVNDGTLQIPTSPDGRTPNAAAITKQDVRNAGFDLDNAYTIMHTNDVHGRLEAGKGELGMARLKTFKDQENPTLMVDAGDVFQGLPISNFSKGADMAKAMNEVGYDAMAVGNHEFDFGLEIALGYKDQLNFPILSSNTYYKDGSGRVFDPYTIVEKSGKKFAIVGVTTPETATKTHPKNVEKVTFKDPIPEVEAVIKEIKEKYADXQAFVVTGHLGVDETTPHIWRGDTLAETLSQTYPELDITVIDGHSHTAVESGKRYGKVIYAQTGNYLNNVGIVTAPESEPTKKTTKLISAAELLELPENPAVKAIVDEARTNFNAENEKVIVDYIPFTLDGQRENVRTRETNLGNLIGDAIMSYGQDAFSQPADFAVTNGGGIRADIKQGPIKVGDVIAVLPFGNSIAQIQVTGAQVKEMFEMSVRSIPQKDENGTILLDDAGQPKLGANGGFLHVSSSIRIHYDSTKPGTRLASDEGNETGQTIVGSRVLGIEIKNRQTQKFEPLDEKKQYRMATNDFLAAGGDGYDMLGGEREEGISLDSVLIEYLKSATSLRLYRAATTIDLAQYKEPFPGERIVSISEEAYKELIGGGETPKPDPKPDPKPTPETPVATNKQNQAGARQSNPSVTEKKKYGGFLPKTGTETETLALYGLLFVGLSSSGWYIYKRRNKAS

SEQ ID NO: 451 - DNA, 1883 bp; double-stranded, linear
acaaagttcagaagcagtaacaagtaccaccgattcaagtagaaaacaagaaccagtcattacacaggaaacaacagacatcaaacaagaagcaccaaatcaggctacgagtgacagtgtcaagcagtcacaagaaaccacagcaccaacagagacgacgaatttagaaacgtcaatcgctgaaaaagaagaaacgagcacgccgcaaaaaataacaattttaggtacgtcagatgttcatggtcaattatggaattggtcttatgaagatgataaagaactaccagttggtttgtcccaagtaagtacagtcgttaaccaagtccgggcacaaaacccagcaggcaccgttttaattgataatggcgacaatattcaaggcactattttaacagatgacttgtataataaagcgcctttagtgaatgaaaagacccatccaatgatcaccgccatgaatgtgatgaagtatgatgcaatggttttgggaaatcatgagtttaattttggtttaccgttaatcaaaaaaattcaacaagaagccacttttccaatcttgtctgcgaatacctacaataaggaagatggtcttcgttttgttgaagggactaccacgaaggaacttgattttaatcaagatgggcagccagatttaaaagttgggattatcggcttaacaattccgcacattcctttgtgggatggccctcgtgttacttcgcttaattttttacctttgaaagaagaagcagaaaaagcagttactgagttgaaagctaacgatcaggctgacattattgttgcctcgattcatgcgggacaacaaaatagtgatccggctgccagtgccgaccaagtaattgaaaatgtcgcggggattgatgcgtatattctgggtcatgaccacctttcttttaccaagcaaggagcagcgccgaatggaaaaactgtaccggtagggggaccgaaagatacggggacagaagttgtcaaaattgatctttcagttgctaaaaatgccgataagtgggaagtgcaagaaggtacagcaacgattgtaccaacaacgaatgttccagcagatgaagcagttaaggcagcgacaaaagaataccatgaaaaaacgcgagcgtttattcaggaggagatcggcacagcaacagctgattttttaccaaaacaagaaattaaaggaattcccgaagcacaattacaaccaacagcgatgatttctttaattaataacgttcaaaaagaagtaacgggcgcacaattaagtgcggcagcgctgtttaaatacgacagtaaattacctgcggggaagatttcctatgccacgatttttgatatctacaaatacccgaataccttagtgagtgttcccattaacggtgaaaacttactgaagtatttagaaaaacaaggggcgtactataaccaaacacagccagatgatttgaccattagttttaatccaaacattcgtgtatataactatgacatgatttctggagtggactacaagattgacatttcaaaaccagtgggtgaacgaattgtagatgcgaaaattgacggccaaccgctggatcctgccaaagaatatacgattgctatgaataattatcgttacggcggtttagctagccaagggattcaagtaggggaacctattaaaaattctgatccagaaaccttacgaggaatgattgttgattatattaagaaaaaaggaactcttgatccagaacaagaaatcgaacgaaattggtcaattattgggacaaattttgatgaaaaatggcgtgccaaagcaatcgaattagtgaatgacggcactcttcaaattccgacttctcctgatggacgtacaccaaacgccg

SEQ ID NO: 452 - protein, 627 aa
QSSEAVTSTTDSSRKQEPVITQETTDIKQEAPNQATSDSVKQSQETTAPTETTNLETSIAEKEETSTPQKITILGTSDVHGQLWNWSYEDDKELPVGLSQVSTVVNQVRAQNPAGTVLIDNGDNIQGTILTDDLYNKAPLVNEKTHPMITAMNVMKYDAMVLGNHEFNFGLPLIKKIQQEATFPILSANTYNKEDGLRFVEGTTTKELDFNQDGQPDLKVGIIGLTIPHIPLWDGPRVTSLNFLPLKEEAEKAVTELKANDQADIIVASIHAGQQNSDPAASADQVIENVAGIDAYILGHDHLSFTKQGAAPNGKTVPVGGPKDTGTEVVKIDLSVAKNADKWEVQEGTATIVPTTNVPADEAVKAATKEYHEKTRAFIQEEIGTATADFLPKQEIKGIPEAQLQPTAMISLINNVQKEVTGAQLSAAALFKYDSKLPAGKISYATIFDIYKYPNTLVSVPINGENLLKYLEKQGAYYNQTQPDDLTISFNPNIRVYNYDMISGVDYKIDISKPVGERIVDAKIDGQPLDPAKEYTIAMNNYRYGGLASQGIQVGEPIKNSDPETLRGMIVDYIKKKGTLDPEQEIERNWSIIGTNFDEKWRAKAIELVNDGTLQIPTSPDGRTPNA

SEQ ID NO: 453 - DNA, 3963 bp; double-stranded, linear; identical to SEQ ID NO: 449

SEQ ID NO: 454 - protein, 1313 aa; identical to SEQ ID NO: 450

SEQ ID NO: 455 - DNA, 1924 bp; double-stranded, linear
tgaaaaatggcgtgccaaagcaatcgaattagtgaatgacggcactcttcaaattccgacttctcctgatggacgtacaccaaacgccgccgctattacgaaacaagatgtccgtaatgcgggctttgatttagataatgcatataccattatgcacacaaatgacgttcatggccgactagaagcagggaaaggcgaattaggtatggcgcgtctaaaaacctttaaagaccaagaaaacccaaccttgatggtggatgcaggggatgttttccaaggattaccaatctccaatttctccaaaggcgcggatatggccaaagcaatgaatgaagttggttatgatgccatggcggtgggaaatcacgagtttgattttggtttagagattgcactaggttataaagaccaactgaattttccgattttatctagtaatacgtattacaaagatggcagtggacgggtttttgatccgtatacaatcgtagaaaaatccgggaaaaagtttgccattgtaggtgtgacgaccccagaaacagcaacgaaaacacacccgaaaaacgtagagaaggtgacatttaaagacccgattccagaagtagaagcagtgattaaggaaattaaagagaagtacgcggatatncaagctttcgtggttactgggcatttaggcgtagatgaaacgacgccgcatatctggcgtggtgatacgctagcagaaacccttagtcaaacatatcctgagttagatatcactgtgattgatggacattcgcatacagccgtcgaaagtggcaaacgttatggcaaagtgatctatgctcaaacaggtaattatttaaataatgttgggatcgtcacagcaccagagagtgaaccaactaagaaaacaacaaaattgatttcagcagcagagctgctagaattgccagaaaacccggcagttaaagccatcgttgatgaagcacgtacgaattttaacgctgaaaatgaaaaagtaattgtcgattatattccattcacattggatggacaacgagaaaatgtgcgcacacgagagaccaacttagggaatttgattggtgatgcgattatgtcatatggccaagacgcgtttagccaacctgctgattttgcagtaactaatggtggcggcattcgcgctgatattaaacaagggccaattaaagttggggatgtcattgctgtgttaccttttggcaatagcattgcgcaaattcaagtaaccggcgcccaagttaaagaaatgtttgaaatgtctgttcgttcgattccacaaaaagatgagaatggcacaattttactagatgatgctggccaaccaaaacttggcgcaaatggtggtttcctacatgtttcaagctccattcgtatccactatgattccacaaaaccaggtactcgcttggctagtgacgaaggcaatgaaacaggacaaacgattgtcggtagtcgcgtattaggaatagaaattaaaaatcggcaaacacaaaagtttgaaccattggatgagaagaaacaataccggatggctaccaatgatttcttagctgctggtggtgatggttacgatatgctaggtggtgaacgagaagaagggatttcactagattctgtcttaattgaatacttgaaaagtgcaaccagcttgcggttgtatcgtgcagcaacgacgattgatttagcacaatataaagaaccattcccaggcgaacgaattgtttctatttcggaagaagcttacaaagagttaatcggtggaggagagacgccaaaaccagatccaaaaccagacccgaaaccaacaccagaaacaccagtagcaaccaataaacaaaaccaagcgggagcaagacagagcaatccatccgtaacagagaagaaaaagtatggcggcttt

SEQ ID NO: 456 - protein, 641 aa
EKWRAKAIELVNDGTLQIPTSPDGRTPNAAAITKQDVRNAGFDLDNAYTIMHTNDVHGRLEAGKGELGMARLKTFKDQENPTLMVDAGDVFQGLPISNFSKGADMAKAMNEVGYDAMAVGNHEFDFGLEIALGYKDQLNFPILSSNTYYKDGSGRVFDPYTIVEKSGKKFAIVGVTTPETATKTHPKNVEKVTFKDPIPEVEAVIKEIKEKYADXQAFVVTGHLGVDETTPHIWRGDTLAETLSQTYPELDITVIDGHSHTAVESGKRYGKVIYAQTGNYLNNVGIVTAPESEPTKKTTKLISAAELLELPENPAVKAIVDEARTNFNAENEKVIVDYIPFTLDGQRENVRTRETNLGNLIGDAIMSYGQDAFSQPADFAVTNGGGIRADIKQGPIKVGDVIAVLPFGNSIAQIQVTGAQVKEMFEMSVRSIPQKDENGTILLDDAGQPKLGANGGFLHVSSSIRIHYDSTKPGTRLASDEGNETGQTIVGSRVLGIEIKNRQTQKFEPLDEKKQYRMATNDFLAAGGDGYDMLGGEREEGISLDSVLIEYLKSATSLRLYRAATTIDLAQYKEPFPGERIVSISEEAYKELIGGGETPKPDPKPDPKPTPETPVATNKQNQAGARQSNPSVTEKKKYGGF

SEQ ID NO: 457 - DNA, 6168 bp; double-stranded, linear
taaaataaaaaattggtacgaagtgaacgttctcttctatgtgtcgttagtagaggaaggatgaaagaaatgagaaagaatggtccaatggtaaaccgttggctctacgggttgatgtgtttgttacttgttctaaattatggcacaccactcatggctttggcggaagaggttaacagcgatggccagttaacgttaggagaagtgaagcaaaccagccagcaagaaatgaccttagcgcttcaaggaaaagcacaaccagtaacacaagaggttgtagtgcattatagtgccaatgtgtcaatcaaagctgcacattgggcagcgcccaataatacgcgcaagattcaagtggatgaccagaagaaacagattcaaattgaattgaatcagcaagcgttagcagatacgttagtcttaacgttgaaccctacagctacagaagatgtgacgttttcttatggacaacagcaacgagcgttgacgttaaagactggtactgatccgacagaatcaacggcaatcacgagttcgccagccgcatcagcgaatgaaggttcaacagaagaagcatctacaaactcctctgttcctcgttcgtccgaagaaactgtcgccagcacgacaaaagcgatagaaagtaaaacaactgaatcgacgactgtcaaaccgcgcgtagcaggaccaacagatatcagtgattattttacaggtgatgaaacaacgattatcgataattttgaagatccgatttatttaaatcctgatggaacaccagcaacaccgccgtataaagaagatgtgaccattcattggaactttaactggtcgattccagaagatgtgcgagaacaaatgaaagcaggcgattacttcgagtttcaattacctggcaatttgaaacctaataaaccaggttcaggtgatttagttgatgcagaaggcaatgtctatggaacctacacaattagtgaagatggtacggttcgttttacctttaatgagcgaatcacgtctgaaagtgacattcacggggacttttctttagatactcatttgaatgattcagatgggcggggcccaggagattgggtgattgatattcctacacaagaagatttgccgcctgtagtgattccaattgtcccagataccgaacaacaaattgataaacaaggccattttgatcgaacgcccaatcctagtgcgattacttggacggtagatatcaatcaagcgatgaaagatcaaacaaatccaactgtgacggaaacatggccaacagggaatacctttaagtccgtgaaagtctatgagttagtgatgaatcttgatggaacaattaaagaagtgggtcgcgaacttagtccagatgaatataccgttgataaaaatggcaatgtgacgattaaaggtgacaccaacaaagcgtatcgtcttgagtaccaaacgacgattgacgaggcggttattccagatggcggcggcgatgtgccttttaaaaatcacgcgacgttaacaagtgataataatccaaatgggttagatgctgaagcaactgttaccgccacatatggcaaaatgttagacaagcgcaatatagattacgacgaagccaatcaagaattcacttgggaaattaactacaactatggtgaacaaaccattccaaaagaccaagcagtcattacagacacaatgggggataatttaacgtttgaaccagattctttacatttatattcagtgacatttgatgacaaaggaaatgaagtcgttggagcagaacttgtggaaggaaaagattacaaagtggtaatcaacggagacggttcctttgcaattgactttttacatgatgtgactggcgcagtcaagattgattataaaaccaaagttgatggaattgtcgaaggcgatgttgccgtgaataatcgtgtggatgttggcactggtcagcattcagaagatgatggcacagccagtcaacaaaatattattaaaaacactggtgcagttgattatcaaaattcaacgattggttggacgttagctgtgaatcaaaataattatttgatggaaaatgccgtgattacggatacgtacgaaccagttcctggcttaactatggtacccaattcgttggttgtcaaagatacaaccactggtgctcagttgacgttaggcaaggatttcatggtagaaataactcgtaatgcagatggtgaaacaggctttaaggtaagttttataggggcgtatgccaaaacaagtgatgccttccacataacttatactacctttttcgatgttaccgagttagacgctaacaatcctgcgttggaccattatcgaaataccgctgccattgattggacggatgaagcaggaaacaatcatcattcagaagatagtaaaccgtttaaacctttacctgcttttgatttaaatgcgcaaaaaagcggtgtttacaatgccgtcaccaaagaaatcacttggacgattgcggttaatttaagtaataatcgtttagtcgacgcctttttgacggatccaattttaaccaatcaaacctatttggctgggagcttgaaagtctatgaaggcaatacaaagccagatggttcggttgaaaaagtgaaaccaacgcaaccgttgacggatatcacaatggaagaaccaagcgagaaaaaccaaaatacttggcgtgttgattttcctaatgatagtcgtacgtatgtgattgaatttaagacgtctgttgatgaaaaagttatcgaaggttcggctagttatgacaataccgcatcttatacaaaccaaggttcttcacgtgatgtgacaggaaaagtttctattcaacatggtggcgaatcagtgaaaaaaggtggcgaataccacaaagatgatccagatcatgtgtactggcatgtaatgatcaatggcgcccaatcggttttagacgatgtggttattactgatacaccctcaccaaaccaagtgctagatcccgagtcattggtgatttacggtaccaacgtaacagaagacggaactattacgccagataaatctgttattttagaagaaggaaaagattacacactggaagttaccaccgataatgaaacaggacaacaaaaaattgtcgttaaaatggcccatattgaagcaccttattatatggaatatcgtagtttagtgacttcttcagcggcggggagtacagacacggtatccaaccaagtgtcaattactggaaatggttcagaagtcgttcatggggatgacaatggcgatgtggtcgttgacattgatcacagtggcgggcatgccacagggactaaaggcaaaattcagctgaagaaaacagccatggatgagacgactattttagcaggcgcccatttccaaatttgggaccaagctaaaacacaagtcctacgtgaaggtacagtagatgccaccggggttatcacatttggtgggttgccacaagggcaatacattttggtggagacaaaagcaccagaaggctatacagtttcggacgaattagctaaaggccgagtcattactattgatgaagaaacttcagccgaaggagcacaaccaaccattattaaaaacgatgtcaataaagtatttttagaaaaaatggatgagaagggtaaaaagttagtcaatgctcgctttaaattagagcatgccgtaaccacgccgtttactcattgggaagaagttccccttgcgccggatcgaaccaacgcgaatggccagttagaggtggatagtttaaaaccagggctttatcagttcacagaaatcgaagcaccgacaggctatcttttagacacgacccccaaacgattcatcgtgacacaaaatacgagcggacaaattcgtgatgttcatgtcaaaatgcttaattaccaaggttctgctgaactaattaaaaaagaccaagcaggcaatccattagcaggtgctgaattttcagtccttgacaccacaggacaagcagttcgagaacacttagtttcggatgcaaacggaaaagtcacagtgacggatttagccccaggaaaatatcaatttgtggaaaccaaagcgccagcagggtaccttttaaacactgaaccaagtgctttcacgattgcagcaagcgatcggggcaaaccagcaacagttatagcaacggctaactttgttaactatcaaggcacggctaaattaatcaaaaaagatgtgaatggacacttattaagtggtgcgacatttaaagtgcttgatgcgaagggagaaacgattcaaacaggcttgacgacaaataatcaaggggaaattgttgcagagcacttagccccaggaaaatatcgctttgtagaaaccaaagcgccaacaggctatttattaaataccacgccagtcccatttgaaattgctgagaaaaatgctggtaaaccagcggtcgtggttgctagtgacaactttgtgagttacaaaggggctttccaaatcgtgaaaacgaatagcgcagaccaaccattagcaggtgctgtttttgaattatatgatcacaataaacaatcattagggattacagcaacgagtggcaaagatggcaaaattatctttagagacttggcgccaggtacctattattacaaagaaatcaaagcaccaaaattaccagatggcgcagattatattatttatcctgaattagtaaaagtagaaattcgtggtgatttcaaaggtgatccggagattttccaattaggggccttcgccaatttcaaaggacgcgccgtctttaagaaaattgatgccaatgcgaacccacttccaggaacgatttttaaattgtatcgaatcgaaaacggggaaaaaatctttgaaagagaagtaactgctgaaaaagatggttcattggctatggaggatttaggtgctggtagctatgaattagatgaactggatgcaacggatggctatatcgtcaataaacaacccatttattttgtagtgaagaagaattcaaatgataaacaaccactagatgagttagagtttgtaaattatcaagcagaagtaatgggacgtaaagtcaacgagcaaggtcaaaccttagcgggtgcagtttttgcaatttacaatgccgatgagcagaatcagccccaaggttcaccgataacattcttgaatcgtgcaggagaaaaagtttctgaaataacaacggataagactggcgaaatttacgctaaagggctaaatgaagggcattacgttttagtggaaacgaaagcaccaacaggctatctgttagacacaacgctacatccatttgatgtaaccgcccaattaggaaaagagcagccaattgctttaggcgatcttatcaattatcaaggaactgctcaattaaccaaagaaaacgaaacaggtgaagcattggcaggtgcggtgtttaaggtcattgatgaaacagggcaaaccgtagatggacaaaccaatctgatgtctgacaagcaaggcaaagtcattgcgaaaaacttagcaccgggaacgtatcgttttgtggagacacaagcgccaactagctatcttcttaatgaaacgccaagcgcaagctttacgattgccaaagacaaccaaggcaaaccagccactgtggtacttaaagcaccttttattaattaccaaggtgctgccaagctggtgaaaattgatcagcaaaagaatgccttagcaggtgctgaatttaaagtgacagatgcagagacagggcaaactgtcgctcgttcattacgttctgacaaccaagggttagttcaagtgaaccacttacaaccaggaaaatatacctttgtggaaacaaaagcaccggatggttaccaactgtctaagcaagctgtcgcattcactattgcggcaacagcgaaagacaaacctgaactcgtgaatgcgggcacgtttgttaacgagaaacaacctgtatccaaaaaaacaaaaccaaatcagccaacaacgaaacaagcagctagagagacaggttggcttggtttaccgaaaaccaacacacaagtcaattacttctttgtctttatcggcctcatgttggtcggtttggcaagttggctcttctataaaaagagcaagaaataa

SEQ ID NO: 458 - protein, 2032 aa
MRKNGPMVNRWLYGLMCLLLVLNYGTPLMALAEEVNSDGQLTLGEVKQTSQQEMTLALQGKAQPVTQEVVVHYSANVSIKAAHWAAPNNTRKIQVDDQKKQIQIELNQQALADTLVLTLNPTATEDVTFSYGQQQRALTLKTGTDPTESTAITSSPAASANEGSTEEASTNSSVPRSSEETVASTTKAIESKTTESTTVKPRVAGPTDISDYFTGDETTIIDNFEDPIYLNPDGTPATPPYKEDVTIHWNFNWSIPEDVREQMKAGDYFEFQLPGNLKPNKPGSGDLVDAEGNVYGTYTISEDGTVRFTFNERITSESDIHGDFSLDTHLNDSDGRGPGDWVIDIPTQEDLPPVVIPIVPDTEQQIDKQGHFDRTPNPSAITWTVDINQAMKDQTNPTVTETWPTGNTFKSVKVYELVMNLDGTIKEVGRELSPDEYTVDKNGNVTIKGDTNKAYRLEYQTTIDEAVIPDGGGDVPFKNHATLTSDNNPNGLDAEATVTATYGKMLDKRNIDYDEANQEFTWEINYNYGEQTIPKDQAVITDTMGDNLTFEPDSLHLYSVTFDDKGNEVVGAELVEGKDYKVVINGDGSFAIDFLHDVTGAVKIDYKTKVDGIVEGDVAVNNRVDVGTGQHSEDDGTASQQNIIKNTGAVDYQNSTIGWTLAVNQNNYLMENAVITDTYEPVPGLTMVPNSLVVKDTTTGAQLTLGKDFMVEITRNADGETGFKVSFIGAYAKTSDAFHITYTTFFDVTELDANNPALDHYRNTAAIDWTDEAGNNHHSEDSKPFKPLPAFDLNAQKSGVYNAVTKEITWTIAVNLSNNRLVDAFLTDPILTNQTYLAGSLKVYEGNTKPDGSVEKVKPTQPLTDITMEEPSEKNQNTWRVDFPNDSRTYVIEFKTSVDEKVIEGSASYDNTASYTNQGSSRDVTGKVSIQHGGESVKKGGEYHKDDPDHVYWHVMINGAQSVLDDVVITDTPSPNQVLDPESLVIYGTNVTEDGTITPDKSVILEEGKDYTLEVTTDNETGQQKIVVKMAHIEAPYYMEYRSLVTSSAAGSTDTVSNQVSITGNGSEVVHGDDNGDVVVDIDHSGGHATGTKGKIQLKKTAMDETTILAGAHFQIWDQAKTQVLREGTVDATGVITFGGLPQGQYILVETKAPEGYTVSDELAKGRVITIDEETSAEGAQPTIIKNDVNKVFLEKMDEKGKKLVNARFKLEHAVTTPFTHWEEVPLAPDRTNANGQLEVDSLKPGLYQFTEIEAPTGYLLDTTPKRFIVTQNTSGQIRDVHVKMLNYQGSAELIKKDQAGNPLAGAEFSVLDTTGQAVREHLVSDANGKVTVTDLAPGKYQFVETKAPAGYLLNTEPSAFTIAASDRGKPATVIATANFVNYQGTAKLIKKDVNGHLLSGATFKVLDAKGETIQTGLTTNNQGEIVAEHLAPGKYRFVETKAPTGYLLNTTPVPFEIAEKNAGKPAVVVASDNFVSYKGAFQIVKTNSADQPLAGAVFELYDHNKQSLGITATSGKDGKIIFRDLAPGTYYYKEIKAPKLPDGADYIIYPELVKVEIRGDFKGDPEIFQLGAFANFKGRAVFKKIDANANPLPGTIFKLYRIENGEKIFEREVTAEKDGSLAMEDLGAGSYELDELDATDGYIVNKQPIYFVVKKNSNDKQPLDELEFVNYQAEVMGRKVNEQGQTLAGAVFAIYNADEQNQPQGSPITFLNRAGEKVSEITTDKTGEIYAKGLNEGHYVLVETKAPTGYLLDTTLHPFDVTAQLGKEQPIALGDLINYQGTAQLTKENETGEALAGAVFKVIDETGQTVDGQTNLMSDKQGKVIAKNLAPGTYRFVETQAPTSYLLNETPSASFTIAKDNQGKPATVVLKAPFINYQGAAKLVKIDQQKNALAGAEFKVTDAETGQTVARSLRSDNQGLVQVNHLQPGKYTFVETKAPDGYQLSKQAVAFTIAATAKDKPELVNAGTFVNEKQPVSKKTKPNQPTTKQAARETGWLGLPKTNTQVNYFFVFIGLMLVGLASWLFYKKSKK

SEQ ID NO: 459 - DNA, 2212 bp; double-stranded, linear
ggaagaggttaacagcgatggccagttaacgttaggagaagtgaagcaaaccagccagcaagaaatgaccttagcgcttcaaggaaaagcacaaccagtaacacaagaggttgtagtgcattatagtgccaatgtgtcaatcaaagctgcacattgggcagcgcccaataatacgcgcaagattcaagtggatgaccagaagaaacagattcaaattgaattgaatcagcaagcgttagcagatacgttagtcttaacgttgaaccctacagctacagaagatgtgacgttttcttatggacaacagcaacgagcgttgacgttaaagactggtactgatccgacagaatcaacggcaatcacgagttcgccagccgcatcagcgaatgaaggttcaacagaagaagcatctacaaactcctctgttcctcgttcgtccgaagaaactgtcgccagcacgacaaaagcgatagaaagtaaaacaactgaatcgacgactgtcaaaccgcgcgtagcaggaccaacagatatcagtgattattttacaggtgatgaaacaacgattatcgataattttgaagatccgatttatttaaatcctgatggaacaccagcaacaccgccgtataaagaagatgtgaccattcattggaactttaactggtcgattccagaagatgtgcgagaacaaatgaaagcaggcgattacttcgagtttcaattacctggcaatttgaaacctaataaaccaggttcaggtgatttagttgatgcagaaggcaatgtctatggaacctacacaattagtgaagatggtacggttcgttttacctttaatgagcgaatcacgtctgaaagtgacattcacggggacttttctttagatactcatttgaatgattcagatgggcggggcccaggagattgggtgattgatattcctacacaagaagatttgccgcctgtagtgattccaattgtcccagataccgaacaacaaattgataaacaaggccattttgatcgaacgcccaatcctagtgcgattacttggacggtagatatcaatcaagcgatgaaagatcaaacaaatccaactgtgacggaaacatggccaacagggaatacctttaagtccgtgaaagtctatgagttagtgatgaatcttgatggaacaattaaagaagtgggtcgcgaacttagtccagatgaatataccgttgataaaaatggcaatgtgacgattaaaggtgacaccaacaaagcgtatcgtcttgagtaccaaacgacgattgacgaggcggttattccagatggcggcggcgatgtgccttttaaaaatcacgcgacgttaacaagtgataataatccaaatgggttagatgctgaagcaactgttaccgccacatatggcaaaatgttagacaagcgcaatatagattacgacgaagccaatcaagaattcacttgggaaattaactacaactatggtgaacaaaccattccaaaagaccaagcagtcattacagacacaatgggggataatttaacgtttgaaccagattctttacatttatattcagtgacatttgatgacaaaggaaatgaagtcgttggagcagaacttgtggaaggaaaagattacaaagtggtaatcaacggagacggttcctttgcaattgactttttacatgatgtgactggcgcagtcaagattgattataaaaccaaagttgatggaattgtcgaaggcgatgttgccgtgaataatcgtgtggatgttggcactggtcagcattcagaagatgatggcacagccagtcaacaaaatattattaaaaacactggtgcagttgattatcaaaattcaacgattggttggacgttagctgtgaatcaaaataattatttgatggaaaatgccgtgattacggatacgtacgaaccagttcctggcttaactatggtacccaattcgttggttgtcaaagatacaaccactggtgctcagttgacgttaggcaaggatttcatggtagaaataactcgtaatgcagatggtgaaacaggctttaaggtaagttttataggggcgtatgccaaaacaagtgatgccttccacataacttatactacctttttcgatgttaccgagttagacgctaacaatcctgcgttggaccattatcgaaataccgctgccattgattgg

SEQ ID NO: 460 - protein, 737 aa
EEVNSDGQLTLGEVKQTSQQEMTLALQGKAQPVTQEVVVHYSANVSIKAAHWAAPNNTRKIQVDDQKKQIQIELNQQALADTLVLTLNPTATEDVTFSYGQQQRALTLKTGTDPTESTAITSSPAASANEGSTEEASTNSSVPRSSEETVASTTKAIESKTTESTTVKPRVAGPTDISDYFTGDETTIIDNFEDPIYLNPDGTPATPPYKEDVTIHWNFNWSIPEDVREQMKAGDYFEFQLPGNLKPNKPGSGDLVDAEGNVYGTYTISEDGTVRFTFNERITSESDIHGDFSLDTHLNDSDGRGPGDWVIDIPTQEDLPPVVIPIVPDTEQQIDKQGHFDRTPNPSAITWTVDINQAMKDQTNPTVTETWPTGNTFKSVKVYELVMNLDGTIKEVGRELSPDEYTVDKNGNVTIKGDTNKAYRLEYQTTIDEAVIPDGGGDVPFKNHATLTSDNNPNGLDAEATVTATYGKMLDKRNIDYDEANQEFTWEINYNYGEQTIPKDQAVITDTMGDNLTFEPDSLHLYSVTFDDKGNEVVGAELVEGKDYKVVINGDGSFAIDFLHDVTGAVKIDYKTKVDGIVEGDVAVNNRVDVGTGQHSEDDGTASQQNIIKNTGAVDYQNSTIGWTLAVNQNNYLMENAVITDTYEPVPGLTMVPNSLVVKDTTTGAQLTLGKDFMVEITRNADGETGFKVSFIGAYAKTSDAFHITYTTFFDVTELDANNPALDHYRNTAAIDW

SEQ ID NO: 461 - DNA, 6168 bp; double-stranded, linear; identical to SEQ ID NO: 457

SEQ ID NO: 462 - protein, 2032 aa; identical to SEQ ID NO: 458

SEQ ID NO: 463 - DNA, 1825 bp; double-stranded, linear
tgccttccacataacttatactacctttttgacggatccaattttaaccaatcaaacctatttggctgggagcttgaaagtctatgaaggcaatacaaagccagatggttcggttgaaaaagtgaaaccaacgcaaccgttgacggatatcacaatggaagaaccaagcgagaaaaaccaaaatacttggcgtgttgattttcctaatgatagtcgtacgtatgtgattgaatttaagacgtctgttgatgaaaaagttatcgaaggttcggctagttatgacaataccgcatcttatacaaaccaaggttcttcacgtgatgtgacaggaaaagtttctattcaacatggtggcgaatcagtgaaaaaaggtggcgaataccacaaagatgatccagatcatgtgtactggcatgtaatgatcaatggcgcccaatcggttttagacgatgtggttattactgatacaccctcaccaaaccaagtgctagatcccgagtcattggtgatttacggtaccaacgtaacagaagacggaactattacgccagataaatctgttattttagaagaaggaaaagattacacactggaagttaccaccgataatgaaacaggacaacaaaaaattgtcgttaaaatggcccatattgaagcaccttattatatggaatatcgtagtttagtgacttcttcagcggcggggagtacagacacggtatccaaccaagtgtcaattactggaaatggttcagaagtcgttcatggggatgacaatggcgatgtggtcgttgacattgatcacagtggcgggcatgccacagggactaaaggcaaaattcagctgaagaaaacagccatggatgagacgactattttagcaggcgcccatttccaaatttgggaccaagctaaaacacaagtcctacgtgaaggtacagtagatgccaccggggttatcacatttggtgggttgccacaagggcaatacattttggtggagacaaaagcaccagaaggctatacagtttcggacgaattagctaaaggccgagtcattactattgatgaagaaacttcagccgaaggagcacaaccaaccattattaaaaacgatgtcaataaagtatttttagaaaaaatggatgagaagggtaaaaagttagtcaatgctcgctttaaattagagcatgccgtaaccacgccgtttactcattgggaagaagttccccttgcgccggatcgaaccaacgcgaatggccagttagaggtggatagtttaaaaccagggctttatcagttcacagaaatcgaagcaccgacaggctatcttttagacacgacccccaaacgattcatcgtgacacaaaatacgagcggacaaattcgtgatgttcatgtcaaaatgcttaattaccaaggttctgctgaactaattaaaaaagaccaagcaggcaatccattagcaggtgctgaattttcagtccttgacaccacaggacaagcagttcgagaacacttagtttcggatgcaaacggaaaagtcacagtgacggatttagccccaggaaaatatcaatttgtggaaaccaaagcgccagcagggtaccttttaaacactgaaccaagtgctttcacgattgcagcaagcgatcggggcaaaccagcaacagttatagcaacggctaactttgttaactatcaaggcacggctaaattaatcaaaaaagatgtgaatggacacttattaagtggtgcgacatttaaagtgcttgatgcgaagggagaaacgattcaaacaggcttgacgacaaataatcaaggg

SEQ ID NO: 464 - protein, 688 aa
AFHITYTTFFDVTELDANNPALDHYRNTAAIDWTDEAGNNHHSEDSKPFKPLPAFDLNAQKSGVYNAVTKEITWTIAVNLSNNRLVDAFLTDPILTNQTYLAGSLKVYEGNTKPDGSVEKVKPTQPLTDITMEEPSEKNQNTWRVDFPNDSRTYVIEFKTSVDEKVIEGSASYDNTASYTNQGSSRDVTGKVSIQHGGESVKKGGEYHKDDPDHVYWHVMINGAQSVLDDVVITDTPSPNQVLDPESLVIYGTNVTEDGTITPDKSVILEEGKDYTLEVTTDNETGQQKIVVKMAHIEAPYYMEYRSLVTSSAAGSTDTVSNQVSITGNGSEVVHGDDNGDVVVDIDHSGGHATGTKGKIQLKKTAMDETTILAGAHFQIWDQAKTQVLREGTVDATGVITFGGLPQGQYILVETKAPEGYTVSDELAKGRVITIDEETSAEGAQPTIIKNDVNKVFLEKMDEKGKKLVNARFKLEHAVTTPFTHWEEVPLAPDRTNANGQLEVDSLKPGLYQFTEIEAPTGYLLDTTPKRFIVTQNTSGQIRDVHVKMLNYQGSAELIKKDQAGNPLAGAEFSVLDTTGQAVREHLVSDANGKVTVTDLAPGKYQFVETKAPAGYLLNTEPSAFTIAASDRGKPATVIATANFVNYQGTAKLIKKDVNGHLLSGATFKVLDAKGETIQTGLTTNNQG

SEQ ID NO: 465 - DNA, 6168 bp; double-stranded, linear; identical to SEQ ID NO: 457

SEQ ID NO: 466 - protein, 2032 aa; identical to SEQ ID NO: 458

SEQ ID NO: 467 - DNA, 1864 bp; double-stranded, linear
taactttgttaactatcaaggcacggctaaattaatcaaaaaagatgtgaatggacacttattaagtggtgcgacatttaaagtgcttgatgcgaagggagaaacgattcaaacaggcttgacgacaaataatcaaggggaaattgttgcagagcacttagccccaggaaaatatcgctttgtagaaaccaaagcgccaacaggctatttattaaataccacgccagtcccatttgaaattgctgagaaaaatgctggtaaaccagcggtcgtggttgctagtgacaactttgtgagttacaaaggggctttccaaatcgtgaaaacgaatagcgcagaccaaccattagcaggtgctgtttttgaattatatgatcacaataaacaatcattagggattacagcaacgagtggcaaagatggcaaaattatctttagagacttggcgccaggtacctattattacaaagaaatcaaagcaccaaaattaccagatggcgcagattatattatttatcctgaattagtaaaagtagaaattcgtggtgatttcaaaggtgatccggagattttccaattaggggccttcgccaatttcaaaggacgcgccgtctttaagaaaattgatgccaatgcgaacccacttccaggaacgatttttaaattgtatcgaatcgaaaacggggaaaaaatctttgaaagagaagtaactgctgaaaaagatggttcattggctatggaggatttaggtgctggtagctatgaattagatgaactggatgcaacggatggctatatcgtcaataaacaacccatttattttgtagtgaagaagaattcaaatgataaacaaccactagatgagttagagtttgtaaattatcaagcagaagtaatgggacgtaaagtcaacgagcaaggtcaaaccttagcgggtgcagtttttgcaatttacaatgccgatgagcagaatcagccccaaggttcaccgataacattcttgaatcgtgcaggagaaaaagtttctgaaataacaacggataagactggcgaaatttacgctaaagggctaaatgaagggcattacgttttagtggaaacgaaagcaccaacaggctatctgttagacacaacgctacatccatttgatgtaaccgcccaattaggaaaagagcagccaattgctttaggcgatcttatcaattatcaaggaactgctcaattaaccaaagaaaacgaaacaggtgaagcattggcaggtgcggtgtttaaggtcattgatgaaacagggcaaaccgtagatggacaaaccaatctgatgtctgacaagcaaggcaaagtcattgcgaaaaacttagcaccgggaacgtatcgttttgtggagacacaagcgccaactagctatcttcttaatgaaacgccaagcgcaagctttacgattgccaaagacaaccaaggcaaaccagccactgtggtacttaaagcaccttttattaattaccaaggtgctgccaagctggtgaaaattgatcagcaaaagaatgccttagcaggtgctgaatttaaagtgacagatgcagagacagggcaaactgtcgctcgttcattacgttctgacaaccaagggttagttcaagtgaaccacttacaaccaggaaaatatacctttgtggaaacaaaagcaccggatggttaccaactgtctaagcaagctgtcgcattcactattgcggcaacagcgaaagacaaacctgaactcgtgaatgcgggcacgtttgttaacgagaaacaacctgtatccaaaaaaacaaaaccaaatcagccaacaacgaaacaagcagctagagagacaggttggcttggt

SEQ ID NO: 468 - protein, 621 aa
NFVNYQGTAKLIKKDVNGHLLSGATFKVLDAKGETIQTGLTTNNQGEIVAEHLAPGKYRFVETKAPTGYLLNTTPVPFEIAEKNAGKPAVVVASDNFVSYKGAFQIVKTNSADQPLAGAVFELYDHNKQSLGITATSGKDGKIIFRDLAPGTYYYKEIKAPKLPDGADYIIYPELVKVEIRGDFKGDPEIFQLGAFANFKGRAVFKKIDANANPLPGTIFKLYRIENGEKIFEREVTAEKDGSLAMEDLGAGSYELDELDATDGYIVNKQPIYFVVKKNSNDKQPLDELEFVNYQAEVMGRKVNEQGQTLAGAVFAIYNADEQNQPQGSPITFLNRAGEKVSEITTDKTGEIYAKGLNEGHYVLVETKAPTGYLLDTTLHPFDVTAQLGKEQPIALGDLINYQGTAQLTKENETGEALAGAVFKVIDETGQTVDGQTNLMSDKQGKVIAKNLAPGTYRFVETQAPTSYLLNETPSASFTIAKDNQGKPATVVLKAPFINYQGAAKLVKIDQQKNALAGAEFKVTDAETGQTVARSLRSDNQGLVQVNHLQPGKYTFVETKAPDGYQLSKQAVAFTIAATAKDKPELVNAGTFVNEKQPVSKKTKPNQPTTKQAARETGWLG

SEQ ID NO: 469 - DNA, 2916 bp; double-stranded, linear; identical to SEQ ID NO: 245

SEQ ID NO: 470 - protein, 962 aa; identical to SEQ ID NO: 246

SEQ ID NO: 471 - DNA, 1078 bp; double-stranded, linear
tgaagaagcggttaaagcaggagatacagaaggaatgaccaatacggtgaaagtgaaagacgacagtctggctgattgtaaacggatattggaaggacaagctactttcccagttcaagcgggtgaaacggaaccagtcgatttagtagttgttgaagatgctagtggtagtttttcagataattttccacatgtaagacaagcgattgatgaagtggttcaaggcttatctgatcaagaccgcgtgatgctggcttcatatcgcggcggaaaacaatttatgtttcctgatggaaagacaaaaattaattcagctgattatgatatgaatgtgcgcgtcaatacgcaattgacttatgataaaagccaatttgtctctggttttggagacgttcggacgtatggtggtacgccaaccgccccaggattgaaactcgctttagatacgtacaatcaaacacacggagatttaacgaatcgaaaaacgtatttcctattagtgacagatggggtcgctaatacacgtttagatggttacttgcataagaccaataccaatgattcaatcaatgaatatccagatccaagacatcctcttcaagtctcagtggaatatagtaatgactaccaaggtgcagcagcagaagttttagcgttaaaccaagaaattactaaccaaggctatgaaatgattaatgcgtattgggaaagtgttgaatctttaagttcagtgaattcatactttgataaatataaaacagaagtgggtccttttgtaaaacaagagttgcaacaagggtctagcacaccagaagattttattacaagccaatctattgatgattttacaacccaattaaaacaaattgtcaaagatcgtctggcgcaatcgacaccagcaacagcttcattaacgattgccaatcaatttgatattcaatctgcgaccgctacggacgatgctggaaatgatgtgcctgttcaaattaacggacaaaccatttcagcaactagtacagaaggttacgtaggaaacatcacgattcactacgaagtcaaagaaaatacagcgattgat

SEQ ID NO: 472 - protein, 359 aa
EEAVKAGDTEGMTNTVKVKDDSLADCKRILEGQATFPVQAGETEPVDLVVVEDASGSFSDNFPHVRQAIDEVVQGLSDQDRVMLASYRGGKQFMFPDGKTKINSADYDMNVRVNTQLTYDKSQFVSGFGDVRTYGGTPTAPGLKLALDTYNQTHGDLTNRKTYFLLVTDGVANTRLDGYLHKTNTNDSINEYPDPRHPLQVSVEYSNDYQGAAAEVLALNQEITNQGYEMINAYWESVESLSSVNSYFDKYKTEVGPFVKQELQQGSSTPEDFITSQSIDDFTTQLKQIVKDRLAQSTPATASLTIANQFDIQSATATDDAGNDVPVQINGQTISATSTEGYVGNITIHYEVKENTAID

SEQ ID NO: 473 - DNA, 2916 bp; double-stranded, linear; identical to SEQ ID NO: 245

SEQ ID NO: 474 - protein, 962 aa; identical to SEQ ID NO: 246

SEQ ID NO: 475 - DNA, 682 bp; double-stranded, linear
gaatcaaggaacaattgctaaggaatttccagaagcgacgattcctaaaaatgacaatgcgcatgcgtgtgacgtgacgccagaagatccaacgattacaaaagatatcgaaaatcaagaacacttagatttaaccaatcgtgaagatagtttcgattggcatgtcaaaacagcctttggcaacgaaaccagtacttggacccaagccagcatggtggatgacattaataaagtgctagatatcattgatgtgaaagtcaccgacgaaaatggtaaagatgttacagctaacggcacagtaacacaagaaaataacaaagtaacttttgaaatgaacaaacaagcagacagctatgactatttaagtggtcatacgtatacaatgactatcaccactaaaattaaaactgacgcaacggacgaagaattagcgccttacattgaacaaggcgggattcccaaccaagccgacttaaactttggcaatgaaggtgacgtgttacattccaacaaaccaaccgtaacaccaccgccagttgatccaaatattgctaaagacgtagaaggacaagaacatttagatttaaccaaccgcgatcaagaatttaaatggaacgtcaaaacagctttcggtaacgaaacaagcacttggacccaagccagcatggtagatgacattaat

SEQ ID NO: 476 - protein, 227 aa
NQGTIAKEFPEATIPKNDNAHACDVTPEDPTITKDIENQEHLDLTNREDSFDWHVKTAFGNETSTWTQASMVDDINKVLDIIDVKVTDENGKDVTANGTVTQENNKVTFEMNKQADSYDYLSGHTYTMTITTKIKTDATDEELAPYIEQGGIPNQADLNFGNEGDVLHSNKPTVTPPPVDPNIAKDVEGQEHLDLTNRDQEFKWNVKTAFGNETSTWTQASMVDDIN

SEQ ID NO: 477 - DNA, 2916 bp; double-stranded, linear; identical to SEQ ID NO: 245

SEQ ID NO: 478 - protein, 962 aa; identical to SEQ ID NO: 246

SEQ ID NO: 479 - DNA, 868 bp; double-stranded, linear
agatgaaaatggtaaagatgttacagctaacggcaaagtaacacaagaaaataacaaagtaacttttgaaatgaacaancaagcngacagctatgactatttaagtggtcatacgtacacaatgaccattactactaaaatcaaagctagcgcaacggacgaagaattagcaccttatattgaacaaggtggcattcccaaccaagccgacttgaactttggcaacgaaggtgacgtgttgcattccaacaaaccaaccgtaacaccacctgcaccaacgccagaagatccaacgattacaaaagatatcgaaggccaagaacatttagatttaaccaaccgtgaccaagaatttaaatggaacgtcaaaacagctttcggtaacgaaacaagcacatggacccaagccagcatggtggatgacattaataaagtgttagacatcacagacgtgaaagttnctgangaaaatggcaaagatgttacagataatggcatagtaacacaagaaaataacaaagtaacttttactatgaacaaaaaagatgacagctactcttacttagctggtcatacatacacaatgactattaccactaaaattaaaactgacgcaacggatgaagaattagcgccttatattgaacaaggcgggattcccaaccaagccgacttaaactttggcaacgaaggtgacgtgttgcattccaacaagccaaccgtaacaccgcctgcaccaacgccagaagacccaaaaaaacctgaacctaaacaaccgctaaaaccgaaaaaaccgttgacgcctacaaatcatcaagcaccaacgaacccagtcaattttggaaaatcagcaagtaaaggaattcat

SEQ ID NO: 480 - protein, 289 aa
DENGKDVTANGKVTQENNKVTFEMNXQADSYDYLSGHTYTMTITTKIKASATDEELAPYIEQGGIPNQADLNFGNEGDVLHSNKPTVTPPAPTPEDPTITKDIEGQEHLDLTNRDQEFKWNVKTAFGNETSTWTQASMVDDINKVLDITDVKVXXENGKDVTDNGIVTQENNKVTFTMNKKDDSYSYLAGHTYTMTITTKIKTDATDEELAPYIEQGGIPNQADLNFGNEGDVLHSNKPTVTPPAPTPEDPKKPEPKQPLKPKKPLTPTNHQAPTNPVNFGKSASKGIH

SEQ ID NO: 481 - DNA, 1356 bp; double-stranded, linear
tgacaagtgaagaaacgtctatttgcatcagtattactatgttcattaacgctatcagcaattgctaccccaagcatcgctttggcggacaatgttgataaaaaaattgaagaaaaaaatcaagaaatttcatcattaaaagcaaaacaaggggatttagcttcacaagtatcttctttagaagcagaagtatcttcagtatttgatgaaagcatggctttacgtgaacaaaagcaaacactaaaagcaaaatcagaacaattacaacaagaaattacaaacttgaatcaacgtattgaaaaacgtaacgaagcaatcaaaaatcaagcacgtgatgttcaagttaatggacaaagcacaacaatgctagatgcagttttagatgcggactcagttgcagatgcaatcagccgtgttcaagctgtttcaacaatcgtaagtgccaacaacgacttaatgcaacaacaaaaagaagacaaacaagccgttgttgataaaaaagctgaaaacgagaaaaaagtgaaacaacttgaagcaacagaagctgaattagaaacaaaacgtcaagatttactttctaaacaatctgaattaaacgtaatgaaagcttcattagcattagaacaatcatcagctgaaagttctaaagctggcttagaaaaacaaaaagcagctgctgaagcagagcaagcacgcttagctgctgaacaaaaagctgcagctgaaaaagccaaacaagctgctgcaaaaccagctaaagctgaagtgaaagcagaagcaccagttgcctcttcatcaacaacagaagcacaagcaccagcaagctcaagctcagcaactgaatcaagcacgcaacaaacaactgaaacaactacaccaagtacagataatagtgcaacagaaaatactggctcttcttcatcagaacaaccagtacaacctacaacaccaagcgataatggaaataatggtggccaaactggtggtggaacagttacaccaacaccagaaccaacaccagcgccttctgctgatccaacaatcaatgcattgaacgttctacgtcaatcattaggtttacgtccagtagtatgggatgcaggtttggcagcttctgcaactgctcgtgcagcacaagttgaagcaggtggcattccaaatgatcactggtctcgtggagatgaagttatcgcaattatgtgggcgccaggtaactcagtaatcatggcgtggtacaatgaaacaaacatggtaacagcttcaggaagcggtcaccgtgattgggaaattaacccaggtattacgcgtgtcggttttggttactcaggtagcacaatcgtaggacactcagcctaa

SEQ ID NO: 482 - protein, 449 aa
VKKRLFASVLLCSLTLSAIATPSIALADNVDKKIEEKNQEISSLKAKQGDLASQVSSLEAEVSSVFDESMALREQKQTLKAKSEQLQQEITNLNQRIEKRNEAIKNQARDVQVNGQSTTMLDAVLDADSVADAISRVQAVSTIVSANNDLMQQQKEDKQAVVDKKAENEKKVKQLEATEAELETKRQDLLSKQSELNVMKASLALEQSSAESSKAGLEKQKAAAEAEQARLAAEQKAAAEKAKQAAAKPAKAEVKAEAPVASSSTTEAQAPASSSSATESSTQQTTETTTPSTDNSATENTGSSSSEQPVQPTTPSDNGNNGGQTGGGTVTPTPEPTPAPSADPTINALNVLRQSLGLRPVVWDAGLAASATARAAQVEAGGIPNDHWSRGDEVIAIMWAPGNSVIMAWYNETNMVTASGSGHRDWEINPGITRVGFGYSGSTIVGHSA

SEQ ID NO: 483 - DNA, 1267 bp; double-stranded, linear
ggacaatgttgataaaaaaattgaagaaaaaaatcaagaaatttcatcattaaaagcaaaacaaggggatttagcttcacaagtatcttctttagaagcagaagtatcttcagtatttgatgaaagcatggctttacgtgaacaaaagcaaacactaaaagcaaaatcagaacaattacaacaagaaattacaaacttgaatcaacgtattgaaaaacgtaacgaagcaatcaaaaatcaagcacgtgatgttcaagttaatggacaaagcacaacaatgctagatgcagttttagatgcggactcagttgcagatgcaatcagccgtgttcaagctgtttcaacaatcgtaagtgccaacaacgacttaatgcaacaacaaaaagaagacaaacaagccgttgttgataaaaaagctgaaaacgagaaaaaagtgaaacaacttgaagcaacagaagctgaattagaaacaaaacgtcaagatttactttctaaacaatctgaattaaacgtaatgaaagcttcattagcattagaacaatcatcagctgaaagttctaaagctggcttagaaaaacaaaaagcagctgctgaagcagagcaagcacgcttagctgctgaacaaaaagctgcagctgaaaaagccaaacaagctgctgcaaaaccagctaaagctgaagtgaaagcagaagcaccagttgcctcttcatcaacaacagaagcacaagcaccagcaagctcaagctcagcaactgaatcaagcacgcaacaaacaactgaaacaactacaccaagtacagataatagtgcaacagaaaatactggctcttcttcatcagaacaaccagtacaacctacaacaccaagcgataatggaaataatggtggccaaactggtggtggaacagttacaccaacaccagaaccaacaccagcgccttctgctgatccaacaatcaatgcattgaacgttctacgtcaatcattaggtttacgtccagtagtatgggatgcaggtttggcagcttctgcaactgctcgtgcagcacaagttgaagcaggtggcattccaaatgatcactggtctcgtggagatgaagttatcgcaattatgtgggcgccaggtaactcagtaatcatggcgtggtacaatgaaacaaacatggtaacagcttcaggaagcggtcaccgtgattgggaaattaacccaggtattacgcgtgtcggttttggttactcaggtagcacaatcgtaggacactcagcc

SEQ ID NO: 484 - protein, 422 aa
DNVDKKIEEKNQEISSLKAKQGDLASQVSSLEAEVSSVFDESMALREQKQTLKAKSEQLQQEITNLNQRIEKRNEAIKNQARDVQVNGQSTTMLDAVLDADSVADAISRVQAVSTIVSANNDLMQQQKEDKQAVVDKKAENEKKVKQLEATEAELETKRQDLLSKQSELNVMKASLALEQSSAESSKAGLEKQKAAAEAEQARLAAEQKAAAEKAKQAAAKPAKAEVKAEAPVASSSTTEAQAPASSSSATESSTQQTTETTTPSTDNSATENTGSSSSEQPVQPTTPSDNGNNGGQTGGGTVTPTPEPTPAPSADPTINALNVLRQSLGLRPVVWDAGLAASATARAAQVEAGGIPNDHWSRGDEVIAIMWAPGNSVIMAWYNETNMVTASGSGHRDWEINPGITRVGFGYSGSTIVGHSA

SEQ ID NO: 485 - DNA, 759 bp; double-stranded, linear
tgatacattaaaaggagggaaaatatgcgcccaaaagagaaaaaaagaggaaaaaattggttaatcaacagtttattagttttactatttatcattggcttagccttaatttttaacaatcagatacgtagttgggtggttcaacaaaatagccgctcgtacgccgttagcaagttgaaaccagctgatgtgaagaaaaatatggctcgtgaaacaacgtttgactttgattcagttgagtccttgagcacagaagcggtgatgaaagcccaatttgaaaacaaaaacttacctgtgattggtgccattgcgataccaagtgtcgaaattaatttgcccatttttaaaggattgtccaatgtcgctttattaactggtgccgggaccatgaaagaagatcaagtcatggggaaaaacaattatgccttggctagtcatcgaacggaagatggcgtttccttattttcacctttagaaagaaccaaaaaagacgaactcatttatatcactgatttatctactgtttatacatacaaaataacttctgtagaaaaaatcgaaccaacccgtgttgagttaattgatgacgttcctggtcaaaatatgattaccttaattacctgtggcgatttacaagcaacgacgcgaattgctgttcaaggaacattagcagcaacgacgcctattaaagacgccaacgacgatatgttgaaggctttccaattggagcaaaaaactttagccgattgggtggcttaa

SEQ ID NO: 486 - protein, 251 aa
YIKRRENMRPKEKKRGKNWLINSLLVLLFIIGLALIFNNQIRSWVVQQNSRSYAVSKLKPADVKKNMARETTFDFDSVESLSTEAVMKAQFENKNLPVIGAIAIPSVEINLPIFKGLSNVALLTGAGTMKEDQVMGKNNYALASHRTEDGVSLFSPLERTKKDELIYITDLSTVYTYKITSVEKIEPTRVELIDDVPGQNMITLITCGDLQATTRIAVQGTLAATTPIKDANDDMLKAFQLEQKTLADWVA

SEQ ID NO: 487 - DNA, 592 bp; double-stranded, linear
cgttagcaagttgaaaccagctgatgtgaagaaaaatatggctcgtgaaacaacgtttgactttgattcagttgagtccttgagcacagaagcggtgatgaaagcccaatttgaaaacaaaaacttacctgtgattggtgccattgcgataccaagtgtcgaaattaatttgcccatttttaaaggattgtccaatgtcgctttattaactggtgccgggaccatgaaagaagatcaagtcatggggaaaaacaattatgccttggctagtcatcgaacggaagatggcgtttccttattttcacctttagaaagaaccaaaaaagacgaactcatttatatcactgatttatctactgtttatacatacaaaataacttctgtagaaaaaatcgaaccaacccgtgttgagttaattgatgacgttcctggtcaaaatatgattaccttaattacctgtggcgatttacaagcaacgacgcgaattgctgttcaaggaacattagcagcaacgacgcctattaaagacgccaacgacgatatgttgaaggctttccaattggagcaaaaaactttagccgattgggtggct

SEQ ID NO: 488 - protein, 197 aa
VSKLKPADVKKNMARETTFDFDSVESLSTEAVMKAQFENKNLPVIGAIAIPSVEINLPIFKGLSNVALLTGAGTMKEDQVMGKNNYALASHRTEDGVSLFSPLERTKKDELIYITDLSTVYTYKITSVEKIEPTRVELIDDVPGQNMITLITCGDLQATTRIAVQGTLAATTPIKDANDDMLKAFQLEQKTLADWVA

SEQ ID NO: 489 - DNA, 1185 bp; double-stranded, linear
taggcggaggtaagcggtatgcgtaaacgacatgcaaagaaaagacatggaggagtgaattggctttttatagtatgtttgttggtggtgattggtggtagtggttatttaataaaaacgttctttttcactagagattcacaagttagtcaagaatcgaaagtggtcttggaagaagatcgccgaagtgataattatgcgaatttaacgaaagaaatagttgcaccagatagtggcgaacttgatcaaaaaattcaagaaacaaattatattggttcggctttgatcattaaagatgatcaggttttagtaaataaaggatatggctttgccaattttgaaaagcaacaagccaacacgccaaacacaaggtttcagattggctcaattcaaaaatcttttaccacaaccttgatcttaaaagcaattgaagaaggtaaacttacattagatacaaaactcgctacgttttatccgcaaattcaaggtgctgaggatattacgattagcgatatgttgaatatgacaagtggtttaaagttatcagcaatgcctaataatatcgttaccgatgaagaaattattcaatttgttaaacaaaataccattcaagtcaataaaggaaaatacaattattccccagtaaattttgtccttttagcaggaatgttagagaaaatgtatcaacgtacctatcaagaattatttaataatctttatcacaaaacggctggtttaaagaattttggcttctatgaaaccttattggaacagcccaataattcaacaagttataaatggacagaagataattcatataaccaagtgctctcaattcctgcagctagttttgcccatgaatttgggactggtaatgtggatatgacgacaggtgatttgtattggtacttacatcaattaacgagtggacatttagtttccaccgcacttttgcaaaaattatggacgtcttctcagcaaagctcttatcatggcggcatctatgttcatgataattatttacgtttacacggcgttgaagcgggtcaacaagccctggttttattttcaaaagatatgaagacaggggtcatattgctaactaactgtgtgaatccagcgaaatacaaagaattaattggttcgttgttccatgatgtaaccaatttaactgttaaattttaa

SEQ ID NO: 490 - protein, 388 aa
MRKRHAKKRHGGVNWLFIVCLLVVIGGSGYLIKTFFFTRDSQVSQESKVVLEEDRRSDNYANLTKEIVAPDSGELDQKIQETNYIGSALIIKDDQVLVNKGYGFANFEKQQANTPNTRFQIGSIQKSFTTTLILKAIEEGKLTLDTKLATFYPQIQGAEDITISDMLNMTSGLKLSAMPNNIVTDEEIIQFVKQNTIQVNKGKYNYSPVNFVLLAGMLEKMYQRTYQELFNNLYHKTAGLKNFGFYETLLEQPNNSTSYKWTEDNSYNQVLSIPAASFAHEFGTGNVDMTTGDLYWYLHQLTSGHLVSTALLQKLWTSSQQSSYHGGIYVHDNYLRLHGVEAGQQALVLFSKDMKTGVILLTNCVNPAKYKELIGSLFHDVTNLTVKF

SEQ ID NO: 491 - DNA, 1075 bp; double-stranded, linear
tttaataaaaacgttctttttcactagagattcacaagttagtcaagaatcgaaagtggtcttggaagaagatcgccgaagtgataattatgcgaatttaacgaaagaaatagttgcaccagatagtggcgaacttgatcaaaaaattcaagaaacaaattatattggttcggctttgatcattaaagatgatcaggttttagtaaataaaggatatggctttgccaattttgaaaagcaacaagccaacacgccaaacacaaggtttcagattggctcaattcaaaaatcttttaccacaaccttgatcttaaaagcaattgaagaaggtaaacttacattagatacaaaactcgctacgttttatccgcaaattcaaggtgctgaggatattacgattagcgatatgttgaatatgacaagtggtttaaagttatcagcaatgcctaataatatcgttaccgatgaagaaattattcaatttgttaaacaaaataccattcaagtcaataaaggaaaatacaattattccccagtaaattttgtccttttagcaggaatgttagagaaaatgtatcaacgtacctatcaagaattatttaataatctttatcacaaaacggctggtttaaagaattttggcttctatgaaaccttattggaacagcccaataattcaacaagttataaatggacagaagataattcatataaccaagtgctctcaattcctgcagctagttttgcccatgaatttgggactggtaatgtggatatgacgacaggtgatttgtattggtacttacatcaattaacgagtggacatttagtttccaccgcacttttgcaaaaattatggacgtcttctcagcaaagctcttatcatggcggcatctatgttcatgataattatttacgtttacacggcgttgaagcgggtcaacaagccctggttttattttcaaaagatatgaagacaggggtcatattgctaactaactgtgtgaatccagcgaaatacaaagaattaattggttcgttgttccatgatgtaaccaatttaactgttaaattt

SEQ ID NO: 492 - protein, 358 aa
LIKTFFFTRDSQVSQESKVVLEEDRRSDNYANLTKEIVAPDSGELDQKIQETNYIGSALIIKDDQVLVNKGYGFANFEKQQANTPNTRFQIGSIQKSFTTTLILKAIEEGKLTLDTKLATFYPQIQGAEDITISDMLNMTSGLKLSAMPNNIVTDEEIIQFVKQNTIQVNKGKYNYSPVNFVLLAGMLEKMYQRTYQELFNNLYHKTAGLKNFGFYETLLEQPNNSTSYKWTEDNSYNQVLSIPAASFAHEFGTGNVDMTTGDLYWYLHQLTSGHLVSTALLQKLWTSSQQSSYHGGIYVHDNYLRLHGVEAGQQALVLFSKDMKTGVILLTNCVNPAKYKELIGSLFHDVTNLTVKF

SEQ ID NO: 493 - DNA, 1005 bp; double-stranded, linear
tagttttctaatctcaccaaaacaaaaatttttaagaaagaaggagagatcgttatgatgagaaaatggaaagtagtagtgggaagtctgggaatgttgattgctctttttatattcggggcatgttcaacaaatagtaaagacaaagatacagtggcttcgaacgaaaaattaaaggtagtagttactaattcgattttagcagatattactgaaaatatagcaaaagataaaattgatttacacagtatcgtacctattgggaaagatccccacgaatatgaacctttgcctgaagatgttcaaaaaacttcaaaagcagatttgattttttataacggtgttaacttggamactggaggaaatgcttggtttacaaaattagtaaaamatgcgaacaaagaggaaaacaaagactattttgcagcaagtgatggcatagatgttatttacttagagggtcagagtgagaaagggaaggaagatccccatgcttggttaaatttagaaaacggtattatttacgctaaaaatattgaaaaatggttagcggaaaaagatcctgataataaaaaattctataaagaaaatctagataagtatattgaaaagttggattctctagacaaagaagctaaatctaaatttgcttcaattccgaatgataaaaaaatgattgttacaagtgaaggatgctttaaatatttctcgaaagcgtataatgtgccttctgcttacatttgggaaatcaacactgaagaagaaggaacaccagatcaaataaaacacttagttgaaaaattacgcacaacaaaagttccctccttattcgtagaaagtagtgtggacgatagaccgatgaaaacagtatcaaaagataccaatattcctatctattcaacgatttttactgattcaattgcagaaaaaggacaagatggtgatagttactatgcgatgatgaaatggaacctggataaaattgctgaaggcctttcgaaataa

SEQ ID NO: 494 - protein, 316 aa
MMRKWKVVVGSLGMLIALFIFGACSTNSKDKDTVASNEKLKVVVTNSILADITENIAKDKIDLHSIVPIGKDPHEYEPLPEDVQKTSKADLIFYNGVNLXTGGNAWFTKLVKXANKEENKDYFAASDGIDVIYLEGQSEKGKEDPHAWLNLENGIIYAKNIEKWLAEKDPDNKKFYKENLDKYIEKLDSLDKEAKSKFASIPNDKKMIVTSEGCFKYFSKAYNVPSAYIWEINTEEEGTPDQIKHLVEKLRTTKVPSLFVESSVDDRPMKTVSKDTNIPIYSTIFTDSIAEKGQDGDSYYAMMKWNLDKIAEGLSK

SEQ ID NO: 495 - DNA, 880 bp; double-stranded, linear
atgttcaacaaatagtaaagacaaagatacagtggcttcgaacgaaaaattaaaggtagtagttactaattcgattttagcagatattactgaaaatatagcaaaagataaaattgatttacacagtatcgtacctattgggaaagatccccacgaatatgaacctttgcctgaagatgttcaaaaaacttcaaaagcagatttgattttttataacggtgttaacttggamactggaggaaatgcttggtttacaaaattagtaaaamatgcgaacaaagaggaaaacaaagactattttgcagcaagtgatggcatagatgttatttacttagagggtcagagtgagaaagggaaggaagatccccatgcttggttaaatttagaaaacggtattatttacgctaaaaatattgaaaaatggttagcggaaaaagatcctgataataaaaaattctataaagaaaatctagataagtatattgaaaagttggattctctagacaaagaagctaaatctaaatttgcttcaattccgaatgataaaaaaatgattgttacaagtgaaggatgctttaaatatttctcgaaagcgtataatgtgccttctgcttacatttgggaaatcaacactgaagaagaaggaacaccagatcaaataaaacacttagttgaaaaattacgcacaacaaaagttccctccttattcgtagaaagtagtgtggacgatagaccgatgaaaacagtatcaaaagataccaatattcctatctattcaacgatttttactgattcaattgcagaaaaaggacaagatggtgatagttactatgcgatgatgaaatggaacctggataaaattgctgaaggcctttcgaaa

SEQ ID NO: 496 - protein, 293 aa
CSTNSKDKDTVASNEKLKVVVTNSILADITENIAKDKIDLHSIVPIGKDPHEYEPLPEDVQKTSKADLIFYNGVNLXTGGNAWFTKLVKXANKEENKDYFAASDGIDVIYLEGQSEKGKEDPHAWLNLENGIIYAKNIEKWLAEKDPDNKKFYKENLDKYIEKLDSLDKEAKSKFASIPNDKKMIVTSEGCFKYFSKAYNVPSAYIWEINTEEEGTPDQIKHLVEKLRTTKVPSLFVESSVDDRPMKTVSKDTNIPIYSTIFTDSIAEKGQDGDSYYAMMKWNLDKIAEGLSK

SEQ ID NO: 497 - protein, 6 aa
LPXTGX

What is claimed is:

1. An isolated nucleic acid molecule comprising a polynucleotide having a nucleotide sequence selected from the group consisting of:
(a) a nucleotide sequence encoding any one of the amino acid sequences of the polypeptides shown in Table 1; or
(b) a nucleotide sequence complementary to any one of the nucleotide sequences in (a).
(c) a nucleotide sequence at least 95% identical to any one of the nucleotide sequences shown in Table 1; or,
(d) a nucleotide sequence at least 95% identical to a nucleotide sequence complementary to any one of the nucleotide sequences shown in Table 1.

2. An isolated nucleic acid molecule of claim 1 comprising a polynucleotide which hybridizes under stringent hybridization conditions to a polynucleotide having a nucleotide sequence identical to a nucleotide sequence in (a) or (b) of claim 1.

3. An isolated nucleic acid molecule of claim 1 comprising a polynucleotide which encodes an epitope-bearing portion of a polypeptide in (a) of claim 1.

4. The isolated nucleic acid molecule of claim 3, wherein said epitope-bearing portion of a polypeptide comprises an amino acid sequence listed in Table 4.

5. A method for making a recombinant vector comprising inserting an isolated nucleic acid molecule of claim 1 into a vector.

6. A recombinant vector produced by the method of claim 5.

7. A host cell comprising the vector of claim 6.

8. A method of producing a polypeptide comprising:
(a) growing the host cell of claim 7 such that the protein is expressed by the cell; and
(b) recovering the expressed polypeptide.

9. An isolated polypeptide comprising a polypeptide selected from the group consisting of:
(a) a polypeptide consisting of one of the complete amino acid sequences of Table 1;
(b) a polypeptide consisting of one the complete amino acid sequences of Table 1 except the N-terminal residue;
(c) a fragment of the polypeptide of (a) having biological activity; and
(d) a fragment of the polypeptide of (a) which binds to an antibody specific for the polypeptide of (a).

10. An isolated antibody specific for the polypeptide of claim 9.

11. A polypeptide produced according to the method of claim 8.

12. An isolated polypeptide comprising an amino acid sequence at least 95% identical to a sequence selected from the group consisting of an amino acid sequence of any one of the polypeptides in Table 1.

13. An isolated polypeptide antigen comprising an amino acid sequence of an E. faecalis epitope shown in Table 4.

14. An isolated nucleic acid molecule comprising a polynucleotide with a nucleotide sequence encoding a polypeptide of claim 9.

15. A hybridoma which produces an antibody of claim 10.

16. A vaccine, comprising:
(1) one or more E. faecalis polypeptides selected from the group consisting of a polypeptide of claim 9; and
(2) a pharmaceutically acceptable diluent, carrier, or excipient;
wherein said polypeptide is present, in an amount effective to elicit protective antibodies in an animal to a member of the Enterococcus genus.

17. A method of preventing or attenuating an infection caused by a member of the Enterococcus genus in an animal, comprising administering to said animal a polypeptide of claim 9, wherein said polypeptide is administered in an amount effective to prevent or attenuate said infection.

18. A method of detecting Enterococcus nucleic acids in a biological sample comprising:
(a) contacting the sample with one or more nucleic acids of claim 1, under conditions such that hybridization occurs, and
(b) detecting hybridization of said nucleic acids to the one or more Enterococcus nucleic acid sequences present in the biological sample.

19. A method of detecting Enterococcus nucleic acids in a biological sample obtained from an animal, comprising:
(a) amplifying one or more Enterococcus nucleic acid sequences in said sample using polymerase chain reaction, and
(b) detecting said amplified Enterococcus nucleic acid.

20. A kit for detecting Enterococcus antibodies in a biological sample obtained from an animal, comprising
(a) a polypeptide of claim 9 attached to a solid support; and
(b) detecting means.

21. A method of detecting Enterococcus antibodies in a biological sample obtained from an animal, comprising
(a) contacting the sample with a polypeptide of claim 9; and
(b) detecting antibody-antigen complexes.
